(19) United States
(12) Patent Application Publication
(10) Pub. No.: US 2004/0123338 A1
(43) Pub. Date: Jun. 24, 2004

(54) Nucleic acid molecules and other molecules associated with plants

(76) Inventor: Karen L. Fincher, Pacific, MO (US)

Correspondence Address: Lawrence M. Lavin, Jr., Monsanto Company, Patent Department, E2NA, 800 N. Lindbergh Boulevard, St. Louis, MO, 63167, US

(21) Appl. No.: 09/732,627

(22) Filed: Dec. 8, 2000

Related U.S. Application Data
(60) Provisional application No. 60/170,255, filed on Dec. 10, 1999.

(51) Int. Cl. C12N 9/22; C07H 21/04; A01H 1/00; C12N 15/82

(52) U.S. Cl. 800/278; 435/199; 536/23.2

(57) ABSTRACT

Expressed Sequence Tags (ESTs) isolated from cotton are disclosed. The ESTs provide a unique molecular tool for the targeting and isolation of novel genes for plant protection and improvement. The disclosed ESTs have utility in the development of new strategies for understanding critical plant developmental and metabolic pathways. The disclosed ESTs have particular utility in isolating genes and promoters, identifying and mapping the genes involved in developmental and metabolic pathways, and determining gene function. Sequence homology analyses using the ESTs provided in the present invention, will result in more efficient gene screening for desirable agronomic traits. An expanding database of these select pieces of the plant genomics puzzle will quickly expand the knowledge necessary for subsequent functional validation, a key limitation in current plant biotechnology efforts.

### FIELD OF THE INVENTION

[0001] The present invention is in the field of plant biochemistry. More specifically the invention relates to nucleic acid molecules that encode proteins and fragments of proteins produced in plant cells, in particular, cotton plants. The invention also relates to proteins and fragments of proteins so encoded and antibodies capable of binding the proteins. The invention also relates to methods of using the nucleic acid molecules, proteins and fragments of proteins.

### INCORPORATION OF SEQUENCE LISTING

[0002] This application contains a sequence listing, which is contained on three identical CD-ROMs: two copies of a sequence listing (Copy 1 and Copy 2) and a sequence listing Computer Readable Form (CRF), all of which are herein incorporated by reference. All three CD-ROMs each contain one file called “LIB3493Reg.rpt” which is 3,144,728 kilobytes in size and was created on Dec. 6, 2000.

### BACKGROUND OF THE INVENTION

[0003] I. Expressed Sequence Tag Nucleic Acid Molecules

[0004] Expressed sequence tags, or ESTs, are short sequences of randomly selected clones from a cDNA (or complementary DNA) library which are representative of the cDNA inserts of these randomly selected clones. McCombie, et al., Nature Genetics, 1:124-130 (1992); Kurata, et al., Nature Genetics, 8: 365-372 (1994); Okubo, et al., Nature Genetics, 2: 173-179 (1992), all of which references are incorporated herein in their entirety.

[0005] Using conventional methodologies, cDNA libraries can be constructed from the mRNA (messenger RNA) of a given tissue or organism using poly dT primers and reverse transcriptase (Efstratiadis, et al., Cell 7:279-288 (1976), the entirety of which is herein incorporated by reference; Higuchi, et al., Proc. Natl. Acad. Sci. (U.S.A.) 73:3146-3150 (1976), the entirety of which is herein incorporated by reference; Maniatis, et al., Cell 8:163 (1976) the entirety of which is herein incorporated by reference; Land, et al., Nucleic Acids Res. 9:2251-2266 (1981), the entirety of which is herein incorporated by reference; Okayama, et al., Mol. Cell. Biol. 2:161-170 (1982), the entirety of which is herein incorporated by reference; Gubler, et al., Gene 25:263 (1983), the entirety of which is herein incorporated by reference).

[0006] Several methods may be employed to obtain full-length cDNA constructs. For example, terminal transferase can be used to add homopolymeric tails of dC residues to the free 3′ hydroxyl groups (Land, et al., Nucleic Acids Res. 9:2251-2266 (1981), the entirety of which is herein incorporated by reference). This tail can then be hybridized by a poly dG oligo which can act as a primer for the synthesis of full length second strand cDNA. Okayama and Berg, report a method for obtaining full length cDNA constructs. This method has been simplified by using synthetic primer-adapters that have both homopolymeric tails for priming the synthesis of the first and second strands and restriction sites for cloning into plasmids (Coleclough, et al., Gene 34:305-314 (1985), the entirety of which is herein incorporated by reference) and bacteriophage vectors (Krawinkel, et al., Nucleic Acids Res. 14:1913 (1986), the entirety of which is herein incorporated by reference; and Han, et al., Nucleic Acids Res. 15:6304 (1987), the entirety of which is herein incorporated by reference).

[0007] These strategies have been coupled with additional strategies for isolating rare mRNA populations. For example, a typical mammalian cell contains between 10,000 and 30,000 different mRNA sequences. Davidson, Gene Activity in Early Development, 2nd ed., Academic Press, New York (1976). The number of clones required to achieve a given probability that a low-abundance mRNA will be present in a cDNA library is N=(ln(1-P))/(ln(1-1/n)) where N is the number of clones required, P is the probability desired, and 1/n is the fractional proportion of the total mRNA that is represented by a single rare mRNA. (Sambrook, et al., Molecular Cloning: A Laboratory Manual, 2nd ed., Cold Spring Harbor Laboratory Press (1989), the entirety of which is herein incorporated by reference.).

[0008] A method to enrich preparations of mRNA for sequences of interest is to fractionate by size. One such method is to fractionate by electrophoresis through an agarose gel (Pennica, et al., Nature 301:214-221 (1983), the entirety of which is herein incorporated by reference). Another such method employs sucrose gradient centrifugation in the presence of an agent, such as methylmercuric hydroxide, that denatures secondary structure in RNA (Schweinfest, et al., Proc. Natl. Acad. Sci. (U.S.A.) 79:4997-5000 (1982), the entirety of which is herein incorporated by reference).

[0009] A frequently adopted method is to construct equalized or normalized cDNA libraries (Ko, Nucleic Acids Res. 18:5705-5711 (1990), the entirety of which is herein incorporated by reference; Patanjali, S. R. et al., Proc. Natl. Acad. Sci. (U.S.A.) 88:1943-1947 (1991), the entirety of which is herein incorporated by reference). Typically, the cDNA population is normalized by subtractive hybridization. Schmidt et al., J. Neurochem. 48:307-312 (1987) the entirety of which is herein incorporated by reference; Fargnoli, et al., Anal. Biochem. 187:364-373 (1990) the entirety of which is herein incorporated by reference; Travis, et al., Proc. Natl. Acad. Sci (U.S.A.) 85:1696-1700 (1988) the entirety of which is herein incorporated by reference; Kato, Eur. J. Neurosci. 2:704 (1990); and Schweinfest, et al., Genet. Anal. Tech. Appl. 7:64 (1990), the entirety of which is herein incorporated by reference). Subtraction represents another method for reducing the population of certain sequences in the cDNA library. Swaroop, et al., Nucleic Acids Res. 19:1954 (1991), the entirety of which is herein incorporated by reference).

[0010] ESTs can be sequenced by a number of methods. Two basic methods may be used for DNA sequencing, the chain termination method of Sanger et al., Proc. Natl. Acad. Sci. (U.S.A.) 74: 5463-5467 (1977), the entirety of which is herein incorporated by reference and the chemical degradation method of Maxam and Gilbert, Proc. Nat. Acad. Sci. (U.S.A.) 74: 560-564 (1977), the entirety of which is herein incorporated by reference. Automation and advances in technology such as the replacement of radioisotopes with fluorescence-based sequencing have reduced the effort required to sequence DNA (Craxton, Methods, 2: 20-26 (1991), the entirety of which is herein incorporated by reference; Ju et al., Proc. Natl. Acad. Sci. (U.S.A.) 92: 4347-4351 (1995), the entirety of which is herein incorporated by reference; Tabor and Richardson, Proc. Natl. Acad. Sci. (U.S.A.) 92: 6339-6343 (1995), the entirety of which is herein incorporated by reference). Automated sequencers are available from, for example, Pharmacia Biotech, Inc., Piscataway, N.J. (Pharmacia ALF), LI-COR, Inc., Lincoln, Nebr. (LI-COR 4,000) and Millipore, Bedford, Mass. (Millipore BaseStation).

[0011] In addition, advances in capillary gel electrophoresis have also reduced the effort required to sequence DNA and such advances provide a rapid high resolution approach for sequencing DNA samples (Swerdlow and Gesteland, Nucleic Acids Res. 18:1415-1419 (1990); Smith, Nature 349:812-813 (1991); Luckey et al., Methods Enzymol. 218:154-172 (1993); Lu et al., J. Chromatog. A. 680:497-501 (1994); Carson et al., Anal. Chem. 65:3219-3226 (1993); Huang et al., Anal. Chem. 64:2149-2154 (1992); Kheterpal et al., Electrophoresis 17:1852-1859 (1996); Quesada and Zhang, Electrophoresis 17:1841-1851 (1996); Baba, Yakugaku Zasshi 117:265-281 (1997), all of which are herein incorporated by reference in their entirety).

[0012] ESTs longer than 150 bases have been found to be useful for similarity searches and mapping. (Adams, et al., Science 252:1651-1656 (1991), herein incorporated by reference.) EST sequences normally range from 150-450 bases. This is the length of sequence information that is routinely and reliably generated using single run sequence data. Typically, only single run sequence data is obtained from the cDNA library, Adams, et al., Science 252:1651-1656 (1991). Automated single run sequencing typically results in an approximately 2-3% error or base ambiguity rate. (Boguski, et al., Nature Genetics, 4:332-333 (1993), the entirety of which is herein incorporated by reference).

[0013] EST databases have been constructed or partially constructed from, for example, C. elegans (McCombrie, et al., Nature Genetics 1:124-131 (1992), human liver cell line HepG2 (Okubo, et al., Nature Genetics 2:173-179 (1992)), human brain RNA (Adams, et al., Science 252:1651-1656 (1991); Adams, et al., Nature 355:632-635 (1992)), Arabidopsis, (Newman, et al., Plant Physiol. 106:1241-1255 (1994)); and rice (Kurata, et al., Nature Genetics 8:365-372 (1994).

[0014] II. Sequence Comparisons

[0015] A characteristic feature of a protein or DNA sequence is that it can be compared with other known protein or DNA sequences. Sequence comparisons can be undertaken by determining the similarity of the test or query sequence with sequences in publicly available or propriety databases (“similarity analysis”) or by searching for certain motifs (“intrinsic sequence analysis”)(e.g. cis elements)(Coulson, Trends in Biotechnology, 12: 76-80 (1994), the entirety of which is herein incorporated by reference; Birren, et al., Genome Analysis, 1: 543-559 (1997), the entirety of which is herein incorporated by reference).

[0016] Similarity analysis includes database search and alignment. Examples of public databases include the DNA Database of Japan (DDBJ)(http://www.ddbj.nig.ac.jp/); Genebank (http://www.ncbi.nlm.nih.gov/web/Genbank/Index.htlm); and the European Molecular Biology Laboratory Nucleic Acid Sequence Database (EMBL) (http://www.ebi.ac.uk/ebi_docs/embl_db.html). A number of different search algorithms have been developed, one example of which are the suite of programs referred to as BLAST programs. There are five implementations of BLAST, three designed for nucleotide sequences queries (BLASTN, BLASTX, and TBLASTX) and two designed for protein sequence queries (BLASTP and TBLASTN) (Coulson, Trends in Biotechnology, 12: 76-80 (1994); Birren, et al., Genome Analysis, 1: 543-559 (1997)).

[0017] BLASTN takes a nucleotide sequence (the query sequence) and its reverse complement and searches them against a nucleotide sequence database. BLASTN was designed for speed, not maximum sensitivity, and may not find distantly related coding sequences. BLASTX takes a nucleotide sequence, translates it in three forward reading frames and three reverse complement reading frames, and then compares the six translations against a protein sequence database. BLASTX is useful for sensitive analysis of preliminary (single-pass) sequence data and is tolerant of sequencing errors (Gish and States, Nature Genetics, 3: 266-272 (1993), the entirety of which is herein incorporated by reference). BLASTN and BLASTX may be used in concert for analyzing EST data (Coulson, Trends in Biotechnology, 12: 76-80 (1994); Birren, et al., Genome Analysis, 1: 543-559 (1997).

[0018] Given a coding nucleotide sequence and the protein it encodes, it is often preferable to use the protein as the query sequence to search a database because of the greatly increased sensitivity to detect more subtle relationships. This is due to the larger alphabet of proteins (20 amino acids) compared with the alphabet of nucleic acid sequences (4 bases), where it is far easier to obtain a match by chance. In addition, with nucleotide alignments, only a match (positive score) or a mismatch (negative score) is obtained, but with proteins, the presence of conservative amino acid substitutions can be taken into account. Here, a mismatch may yield a positive score if the non-identical residue has physical/chemical properties similar to the one it replaced. Various scoring matrices are used to supply the substitution scores of all possible amino acid pairs. A general purpose scoring system is the BLOSUM62 matrix (Henikoff and Henikoff, Proteins, 17: 49-61 (1993), the entirety of which is herein incorporated by reference), which is currently the default choice for BLAST programs. BLOSUM62 is tailored for alignments of moderately diverged sequences and thus may not yield the best results under all conditions. Altschul, J. Mol. Biol. 36: 290-300 (1993), the entirety of which is herein incorporated by reference, uses a combination of three matrices to cover all contingencies. This may improve sensitivity, but at the expense of slower searches. In practice, a single BLOSUM62 matrix is often used but others (PAM40 and PAM250) may be attempted when additional analysis is necessary. Low PAM matrices are directed at detecting very strong but localized sequence similarities, whereas high PAM matrices are directed at detecting long but weak alignments between very distantly related sequences.

[0019] Homologues in other organisms are available that can be used for comparative sequence analysis. Multiple alignments are performed to study similarities and differences in a group of related sequences. CLUSTAL W is a multiple sequence alignment package available that performs progressive multiple sequence alignments based on the method of Feng and Doolittle, J. Mol. Evol. 25: 351-360 (1987), the entirety of which is herein incorporated by reference. Each pair of sequences is aligned and the distance between each pair is calculated; from this distance matrix, a guide tree is calculated, and all of the sequences are progressively aligned based on this tree. A feature of the program is its sensitivity to the effect of gaps on the alignment; gap penalties are varied to encourage the insertion of gaps in probable loop regions instead of in the middle of structured regions. Users can specify gap penalties, choose between a number of scoring matrices, or supply their own scoring matrix for both the pairwise alignments and the multiple alignments. CLUSTAL W for UNIX and VMS systems is available at: ftp.ebi.ac.uk. Another program is MACAW (Schuler et al., Proteins, Struct. Func. Genet, 9:180-190 (1991), the entirety of which is herein incorporated by reference, for which both Macintosh and Microsoft Windows versions are available. MACAW uses a graphical interface, provides a choice of several alignment algorithms, and is available by anonymous ftp at: ncbi.nlm.nih.gov (directory/pub/macaw).

[0020] Sequence motifs are derived from multiple alignments and can be used to examine individual sequences or an entire database for subtle patterns. With motifs, it is sometimes possible to detect distant relationships that may not be demonstrable based on comparisons of primary sequences alone. Currently, the largest collection of sequence motifs in the world is PROSITE (Bairoch and Bucher, Nucleic Acid Research, 22: 3583-3589 (1994), the entirety of which is herein incorporated by reference.) PROSITE may be accessed via either the ExPASy server on the World Wide Web or anonymous ftp site. Many commercial sequence analysis packages also provide search programs that use PROSITE data.

[0021] A resource for searching protein motifs is the BLOCKS E-mail server developed by S. Henikoff, Trends Biochem Sci., 18:267-268 (1993), the entirety of which is herein incorporated by reference; Henikoff and Henikoff, Nucleic Acid Research, 19:6565-6572 (1991), the entirety of which is herein incorporated by reference; Henikoff and Henikoff, Proteins, 17: 49-61 (1993). BLOCKS searches a protein or nucleotide sequence against a database of protein motifs or “blocks.” Blocks are defined as short, ungapped multiple alignments that represent highly conserved protein patterns. The blocks themselves are derived from entries in PROSITE as well as other sources. Either a protein or nucleotide query can be submitted to the BLOCKS server; if a nucleotide sequence is submitted, the sequence is translated in all six reading frames and motifs are sought in these conceptual translations. Once the search is completed, the server will return a ranked list of significant matches, along with an alignment of the query sequence to the matched BLOCKS entries.

[0022] Conserved protein domains can be represented by two-dimensional matrices, which measure either the frequency or probability of the occurrences of each amino acid residue and deletions or insertions in each position of the domain. This type of model, when used to search against protein databases, is sensitive and usually yields more accurate results than simple motif searches. Two popular implementations of this approach are profile searches (such as GCG program ProfileSearch) and Hidden Markov Models (HMMs)(Krough et al., J. Mol. Biol. 235:1501-1531 (1994); Eddy, Current Opinion in Structural Biology 6:361-365 (1996), both of which are herein incorporated by reference in their entirety). In both cases, a large number of common protein domains have been converted into profiles, as present in the PROSITE library, or HHM models, as in the Pfam protein domain library (Sonnhammer et al., Proteins 28:405-420 (1997), the entirety of which is herein incorporated by reference). Pfam contains more than 500 HMM models for enzymes, transcription factors, signal transduction molecules, and structural proteins. Protein databases can be queried with these profiles or HMM models, which will identify proteins containing the domain of interest. For example, HMMSW or HMMFS, two programs in a public domain package called HMMER (Sonnhammer et al., Proteins 28:405-420 (1997)) can be used.

[0023] PROSITE and BLOCKS represent collected families of protein motifs. Thus, searching these databases entails submitting a single sequence to determine whether or not that sequence is similar to the members of an established family. Programs working in the opposite direction compare a collection of sequences with individual entries in the protein databases. An example of such a program is the Motif Search Tool, or MoST (Tatusov et al. Proc. Natl. Acad. Sci. 91: 12091-12095 (1994), the entirety of which is herein incorporated by reference.) On the basis of an aligned set of input sequences, a weight matrix is calculated by using one of four methods (selected by the user); a weight matrix is simply a representation, position by position in an alignment, of how likely a particular amino acid will appear. The calculated weight matrix is then used to search the databases. To increase sensitivity, newly found sequences are added to the original data set, the weight matrix is recalculated, and the search is performed again. This procedure continues until no new sequences are found.

### SUMMARY OF THE INVENTION

[0024] The present invention provides a substantially purified nucleic acid molecule that encodes a cotton protein or fragment thereof comprising a nucleic acid sequence selected from the group consisting of SEQ ID NO: 1 through SEQ ID NO: 4930.

[0025] The present invention also provides one or more substantially purified nucleic acid molecules comprising a nucleic acid sequence selected from the group consisting of SEQ ID NO: 1 through SEQ ID NO:4930 or complements thereof.

[0026] The present invention also provides a substantially purified cotton protein or fragment thereof, wherein said cotton protein is encoded by a nucleic acid molecule that comprises a nucleic acid sequence selected from the group consisting of SEQ ID NO: 1 through SEQ ID NO: 4930.

[0027] The present invention further provides a substantially purified protein, peptide, or fragment thereof encoded by a nucleic acid sequence which specifically hybridizes to a nucleic acid molecule comprising a nucleic acid sequence selected from the group consisting of a complement of SEQ ID NO: 1 through SEQ ID NO:4930.

[0028] The present invention further provides a substantially purified antibody capable of specifically binding to a protein or fragment thereof encoded by a nucleic acid sequence which specifically hybridizes to a nucleic acid molecule having a nucleic acid sequence selected from the group consisting of a complement of SEQ ID NO: 1 through SEQ ID NO:4930.

[0029] The present invention also provides a transformed plant transformed to contain a nucleic acid molecule which comprises: (A) an exogeneous promoter region which functions in plant cells to cause the production of an mRNA molecule; which is linked to (B) a structural nucleic acid molecule, wherein said structural nucleic acid molecule comprises a nucleic acid molecule that encodes a protein, peptide, or fragment thereof which hybridizes to a nucleic acid sequence selected from the group consisting of a complement of SEQ ID NO:1 through SEQ ID NO:4930 expressed in an effective amount to produce a desirable agronomic effect; which is linked to (C) a 3′ non-translated sequence that functions in plant cells to cause the termination of transcription and the addition of polyadenylated ribonucleotides to the 3′ end of the mRNA sequence.

[0030] The present invention also provides a transformed plant cell containing a nucleic acid molecule whose non-transcribed strand encodes a protein or fragment thereof, wherein the transcribed strand of said nucleic acid is complementary to a nucleic acid molecule that encodes a protein or fragment thereof. The present invention also provides bacterial, viral, microbial, and plant cells comprising a nucleic acid molecule of the present invention

[0031] The present invention also provides a method of producing a plant containing one or more proteins encoded by sequences comprising SEQ ID NO:1 or complement thereof through SEQ ID NO:4930 or complements thereof, expressed in a sufficient amount and/or fashion to produce a desirable agronomic effect.

[0032] In accomplishing the foregoing, there is provided, in accordance with one aspect of the present invention, methods of producing genetically transformed plants, comprising the steps of:

[0033] (a) inserting into the genome of a plant cell a recombinant, double-stranded DNA molecule comprising

[0034] (i) a promoter which functions in plant cells to cause the production of an RNA sequence,

[0035] (ii) a structural DNA sequence that causes the production of an RNA sequence which encodes a desired protein.

[0036] (iii) a 3′ non-translated DNA sequence which functions in plant cells to cause the addition of polyadenylated nucleotides to the 3′ end of RNA sequence; where the promoter is homologous or heterologous with respect to the coding sequence and adapted to cause sufficient expression of a protein in desired plant tissues to enhance the agronomic utility of a plant transformed with said gene.

[0037] (b) obtaining a transformed plant cell with said nucleic acid molecule that encodes one or more proteins, wherein said nucleic acid molecule is transcribed and results in expression of said protein(s); and

[0038] (c) regenerating from the transformed plant cell a genetically transformed plant

[0039] The present invention also encompasses differentiated plants, seeds, and progeny comprising said transformed plant cells and which exhibit novel properties of agronomic significance.

[0040] The present invention also provides a method of producing a plant containing reduced levels of a protein comprising: (A) transforming a plant cell with a nucleic acid molecule that encodes a protein, wherein said nucleic acid molecule is transcribed and results in co-suppression of endogenous protein synthesis activity, and (B) regenerating plants and producing subsequent progeny from the transformed plant.

[0041] The present invention also provides a method of determining an association between a polymorphism and a plant trait comprising: (A) hybridizing a nucleic acid molecule specific for a polymorphism to genetic material of a plant, wherein said nucleic acid molecule comprising a nucleic acid sequence selected from the group consisting of SEQ ID NO: 1 through SEQ ID NO:4930 or complements thereof; and (B) calculating the degree of association between the polymorphism and the plant trait.

[0042] The present invention also provides a method of isolating a genetic region, or nucleic acid that encodes a protein or fragment thereof comprising: (A) incubating under conditions permitting nucleic acid hybridization: a marker nucleic acid molecule, preferably an EST, with a complementary nucleic acid molecule obtained from a plant cell or plant tissue; (B) permitting hybridization between said marker nucleic acid molecule, preferably an EST, and said complementary nucleic acid molecule obtained from said plant cell or plant tissue; and (C) isolating said complementary nucleic acid molecule.

[0043] The present invention also provides a method for determining a level or pattern in a plant cell of a protein in a plant comprising: (A) incubating, under conditions permitting nucleic acid hybridization, a marker nucleic acid molecule, the marker nucleic acid molecule selected from the group of marker nucleic acid molecules which specifically hybridize to a nucleic acid molecule having the nucleic acid sequence selected from the group consisting of SEQ ID NO: 1 through SEQ ID NO: 4930 or complements thereof or fragments of either, with a complementary nucleic acid molecule obtained from the plant cell or plant tissue, wherein nucleic acid hybridization between the marker nucleic acid molecule and the complementary nucleic acid molecule obtained from the plant cell or plant tissue permits the detection of an mRNA for the enzyme; (B) permitting hybridization between the marker nucleic acid molecule and the complementary nucleic acid molecule obtained from the plant cell or plant tissue; and (C) detecting the level or pattern of the complementary nucleic acid, wherein the detection of the complementary nucleic acid is predictive of the level or pattern of the protein.

[0044] The present invention also provides a method for determining the level or pattern of a protein in a plant cell or plant tissue comprising: (A) incubating under conditions permitting nucleic acid hybridization: a marker nucleic acid molecule, the marker nucleic acid molecule comprising a nucleotide sequence selected from the group consisting of SEQ ID NO: 1 through SEQ ID NO:4930 or complements thereof, with a complementary nucleic acid molecule obtained from a plant cell or plant tissue, wherein nucleic acid hybridization between the marker nucleic acid molecule, and the complementary nucleic acid molecule obtained from the plant cell or plant tissue permits the detection of said protein; (B) permitting hybridization between the marker nucleic acid molecule and the complementary nucleic acid molecule obtained from the plant cell or plant tissue; and (C) detecting the level or pattern of the complementary nucleic acid, wherein the detection of said complementary nucleic acid is predictive of the level or pattern of the protein synthesis.

[0045] The present invention also provides a method for determining a level or pattern of a protein in a plant cell or plant tissue which comprises assaying the concentration of a molecule, whose concentration is dependent upon the expression of a gene, the gene having a nucleic acid sequence which specifically hybridizes to a protein marker nucleic acid molecule, the molecule being present in a plant cell or plant tissue, in comparison to the concentration of that molecule present in a plant cell or plant tissue with a known level or pattern of said protein, wherein an assayed concentration of the molecule is compared to the assayed concentration of the molecule in a plant cell or plant tissue with a known level or pattern of said protein.

[0046] The present invention also provides a method of determining a mutation in a plant whose presence is predictive of a mutation affecting a level or pattern of a protein comprising the steps: (A) incubating, under conditions permitting nucleic acid hybridization, a marker nucleic acid, the marker nucleic acid selected from the group of marker nucleic acid molecules which specifically hybridize to a nucleic acid molecule consisting of the nucleic acid sequence selected from the group consisting of SEQ ID NO: 1 through SEQ ID NO: 4930 or complements thereof or fragments of either and a complementary nucleic acid molecule obtained from the plant, wherein nucleic acid hybridization between the marker nucleic acid molecule and the complementary nucleic acid molecule obtained from the plant permits the detection of a polymorphism whose presence is predictive of a mutation affecting the level or pattern of the protein in the plant; (B) permitting hybridization between the marker nucleic acid molecule and the complementary nucleic acid molecule obtained from the plant; and (C) detecting the presence of the polymorphism, wherein the detection of the polymorphism is predictive of the mutation.

[0047] The present invention also provides a method for determining a mutation in a plant whose presence is predictive of a mutation affecting the level or pattern of protein synthesis comprising the steps: (A) incubating under conditions permitting nucleic acid hybridization: a marker nucleic acid molecule, the marker nucleic acid molecule comprising a nucleic acid molecule that is linked to gene, the gene having a nucleic acid sequence which specifically hybridizes to a sequence selected from the group consisting of SEQ ID NO: 1 through SEQ ID NO:4930 and complements thereof, and a complementary nucleic acid molecule obtained from a plant tissue or plant cell of the plant, wherein nucleic acid hybridization between the marker nucleic acid molecule and the complementary nucleic acid molecule obtained from the plant permits the detection of a polymorphism whose presence is predictive of a mutation affecting said level or pattern of a protein synthesis in the plant; (B) permitting hybridization between said marker nucleic acid molecule and said complementary nucleic acid molecule obtained from said plant; and; (C) detecting the presence of the polymorphism, wherein the detection of the polymorphism is predictive of the mutation.

[0048] The present invention also provides a method for reducing expression of a protein in a plant cell, the method comprising: growing a transformed plant cell containing a nucleic acid molecule whose non-transcribed strand encodes a protein or fragment thereof, wherein the transcribed strand of said nucleic acid is complementary to a nucleic acid molecule that encodes the protein in said plant cell, and whereby the strand that is complementary to the nucleic acid molecule that encodes the protein reduces or depresses expression of the protein.

[0049] The present invention provides cotton nucleic acid molecules for use as molecular tags to isolate genetic regions (i.e. promoters and flanking sequences), isolate genes, map genes, and determine gene function. The present invention further provides cotton nucleic acid molecules for use in determining if genes are members of a particular gene family.

[0050] The present invention also provides a method of obtaining full length genes using cotton ESTs or complements thereof or fragments of either.

[0051] The present invention also provides a method of isolating promoters and flanking sequences using cotton ESTs or complements thereof or fragments of either.

[0052] The present invention also provides cotton ESTs or complements thereof or fragments of either for use in marker-assisted breeding programs.

[0053] The present invention also provides a method of identifying tissues comprising hybridizing nucleic acids from the tissue with cotton ESTs or complements thereof or fragments of either.

[0054] The present invention also provides a method for production of antibodies targeted against the proteins, peptides, or fragments produced by the disclosed or complements thereof or fragments of either.

[0055] The present invention also provides a method for the transformation and regeneration of plants comprising sequences hybridizable to the disclosed ESTs or complements thereof or fragments of either.

[0056] The present invention also provides a method of modifying plant protein expression by inserting in a chimeric gene sense or antisense constructs of the cotton ESTs.

### DETAILED DESCRIPTION OF THE INVENTION

[0057] Agents

[0058] (a) Nucleic Acid Molecules

[0059] Agents of the present invention include nucleic acid molecules and more specifically EST nucleic acid molecules or nucleic acid fragment molecules thereof. Fragment EST nucleic acid molecules may encode significant portion(s) of, or indeed most of, the EST nucleic acid molecule. Alternatively, the fragments may comprise smaller oligonucleotides (having from about 15 to about 250 nucleotide residues, and more preferably, about 15 to about 30 nucleotide residues).

[0060] A subset of the nucleic acid molecules of the present invention includes nucleic acid molecules that are marker molecules. Another subset of the nucleic acid molecules of the present invention include nucleic acid molecules that encode a protein or fragment thereof. Another subset of the nucleic acid molecules of the present invention are EST molecules.

[0061] The term “substantially purified”, as used herein, refers to a molecule separated from substantially all other molecules normally associated with it in its native state. More preferably a substantially purified molecule is the predominant species present in a preparation. A substantially purified molecule may be greater than 60% free, preferably 75% free, more preferably 90% free, and most preferably 95% free from the other molecules (exclusive of solvent) present in the natural mixture. The term “substantially purified” is not intended to encompass molecules present in their native state.

[0062] The agents of the present invention will preferably be “biologically active” with respect to either a structural attribute, such as the capacity of a nucleic acid to hybridize to another nucleic acid molecule, or the ability of a protein to be bound by antibody (or to compete with another molecule for such binding). Alternatively, such an attribute may be catalytic, and thus involve the capacity of the agent to mediate a chemical reaction or response.

[0063] The agents of the present invention may also be recombinant. As used herein, the term recombinant, refers to a) molecules that are constructed outside of living cells by joining natural or synthetic DNA segments to DNA molecules that can replicate in a living cell or b) molecules that result from the replication or expression of those molecules described above or c) amino acid molecules from different sources which are joined together.

[0064] It is understood that the agents of the present invention may be labeled with reagents that facilitate detection of the agent (e.g. fluorescent labels (Prober, et al., Science 238:336-340 (1987); Albarella et al., EP 144914, chemical labels (Sheldon et al., U.S. Pat. No. 4,582,789; Albarella et al., U.S. Pat. No. 4,563,417, modified bases (Miyoshi et al., EP 119448, all of which are hereby incorporated by reference in their entirety).

[0065] It is further understood, that the present invention provides bacterial, viral, microbial, and plant cells comprising the agents of the present invention.

[0066] Nucleic acid molecules or fragment thereof of the present invention are capable of specifically hybridizing to other nucleic acid molecules under certain circumstances. As used herein, two nucleic acid molecules are said to be capable of specifically hybridizing to one another if the two molecules are capable of forming an anti-parallel, double-stranded nucleic acid structure. A nucleic acid molecule is said to be the “complement” of another nucleic acid molecule if they exhibit complete complementarity. As used herein, molecules are said to exhibit “complete complementarity” when every nucleotide of one of the molecules is complementary to a nucleotide of the other. Two molecules are said to be “minimally complementary” if they can hybridize to one another with sufficient stability to permit them to remain annealed to one another under at least conventional “low-stringency” conditions. Similarly, the molecules are said to be “complementary” if they can hybridize to one another with sufficient stability to permit them to remain annealed to one another under conventional “high-stringency” conditions. Conventional stringency conditions are described by Sambrook, et al., In: Molecular Cloning, A Laboratory Manual, 2nd Edition, Cold Spring Harbor Press, Cold Spring Harbor, N.Y (1989), and by Haymes, et al. In: Nucleic Acid Hybridization, A Practical Approach, IRL Press, Washington, DC (1985), the entirety of which is herein incorporated by reference. Departures from complete complementarity are therefore permissible, as long as such departures do not completely preclude the capacity of the molecules to form a double-stranded structure. Thus, in order for an nucleic acid molecule or fragment of the present invention to serve as a primer or probe it need only be sufficiently complementary in sequence to be able to form a stable double-stranded structure under the particular solvent and salt concentrations employed.

[0067] Appropriate stringency conditions which promote DNA hybridization are, for example, 6.0×sodium chloride/sodium citrate (SSC) at about 45° C., followed by a wash of 2.0×SSC at 50° C., are known to those skilled in the art or can be found in Current Protocols in Molecular Biology, John Wiley & Sons, N.Y. (1989), 6.3.1-6.3.6. For example, the salt concentration in the wash step can be selected from a low stringency of about 2.0×SSC at 50° C. to a high stringency of about 0.2×SSC at 50° C. In addition, the temperature in the wash step can be increased from low stringency conditions at room temperature, about 22° C., to high stringency conditions at about 65° C. Both temperature and salt may be varied, or either the temperature or the salt concentration may be held constant while the other variable is changed.

[0068] In a preferred embodiment, a nucleic acid of the present invention will specifically hybridize to one or more of the nucleic acid molecules set forth in SEQ ID NO: 1 through SEQ ID NO: 4930 or complements thereof under moderately stringent conditions, for example, at about 2.0×SSC and about 65° C.

[0069] In a particularly preferred embodiment, a nucleic acid of the present invention will include those nucleic acid molecules that specifically hybridize to one or more of the nucleic acid molecules set forth in SEQ ID NO:1 through SEQ ID NO: 4930 or complements thereof under high stringency conditions.

[0070] In one aspect of the present invention, the nucleic acid molecules of the present invention have one or more of the nucleic acid sequences set forth in SEQ ID NO: 1 through SEQ ID NO:4930 or complements thereof. In another aspect of the present invention, one or more of the nucleic acid molecules of the present invention share between 100% and 90% sequence identity with one or more of the nucleic acid sequences set forth in SEQ ID NO: 1 through SEQ ID NO:4930 or complements thereof. In a further aspect of the present invention, one or more of the nucleic acid molecules of the present invention share between 100% and 95% sequence identity with one or more of the nucleic acid sequences set forth in SEQ ID NO: 1 through SEQ ID NO:4930 or complements thereof. In a more preferred aspect of the present invention, one or more of the nucleic acid molecules of the present invention share between 100% and 98% sequence identity with one or more of the nucleic acid sequences set forth in SEQ ID NO: 1 through SEQ ID NO:4930 or complements thereof. In an even more preferred aspect of the present invention, one or more of the nucleic acid molecules of the present invention share between 100% and 99% sequence identity with one or more of the sequences set forth in SEQ ID NO: 1 through SEQ ID NO:4930 or complements thereof. In a further, even more preferred aspect of the present invention, one or more of the nucleic acid molecules of the present invention exhibit 100% sequence identity with one or more nucleic acid molecules present within the cDNA library designated LIB3493 (Monsanto Company, St. Louis, Mo., United States of America).

[0071] “Percentage of sequence identity” is determined by comparing two optimally aligned sequences over a comparison window, wherein the portion of the polynucleotide sequence in the comparison window may comprise additions or deletions (i.e., gaps) as compared to the reference sequence (which does not comprise additions or deletions) for optimal alignment of the two sequences. The percentage is calculated by determining the number of positions at which the identical nucleic acid base or amino acid residue occurs in both sequences to yield the number of matched positions, dividing the number of matched positions by the total number of positions in the window of comparison and multiplying the result by 100 to yield the percentage of sequence identity. Methods commonly employed to determine percentage sequence identity between two sequences include, but are not limited to, those disclosed in Guide to Huge Computers, Martin J. Bishop, ed., Academic Press, San Diego, 1994, and Carillo, H., and Lipton, D.;Siam, J Applied Math (1988) 48:1073, herein incorporated by reference in their entirety. Methods to determine percentage sequence identity are codified in computer programs. Preferred computer programs for determining percentage sequence identity between two sequences include, but are not limited to, the BLAST suite of programs publicly available from NCBI and other sources (BLAST Manual, Altschul et al., Natl. Cent. Biotechnol. Inf., Natl. Library Med. (NCBI NLM) NIH, Bethesda, Md. 20894; Altschul et al., J. Mol. Biol. 215:403-410 (1990), Pearson et al., Proc. Natl. Acad. Sci. U.S.A. 85:2444-2448 (1988), the FAST programs (Pearson et al., Proc. Natl. Acad. Sci. U.S.A. 85:2444-2448 (1988), the GAP and BESTFIT programs found in the GCG program package,(Madison, Wis.) and Cross_Match (Phi Green, University of Washington). Another preferred method to determine identity, is by the method of DNASTAR protein alignment protocol using the Jotun-Hein algorithm (Hein et al., Methods Enzymol. 183:626-645 (1990)).

[0072] In a preferred embodiment of the present invention, a cotton protein or fragment thereof of the present invention is a homologue of another plant protein. In another preferred embodiment of the present invention, a cotton protein or fragment thereof of the present invention is a homologue of a fungal protein. In another preferred embodiment of the present invention, a cotton protein or fragment thereof of the present invention is a homologue of a mammalian protein. In another preferred embodiment of the present invention, a cotton protein or fragment thereof of the present invention is a homologue of a bacterial protein. In another preferred embodiment of the present invention, a cotton protein or fragment thereof of the present invention is a homologue of an algal protein. In another preferred embodiment of the present invention, a cotton protein or fragment thereof of the present invention is a homologue of a soybean protein. In another preferred embodiment of the present invention, a cotton protein or fragment thereof of the present invention is a homologue of a maize protein. In another preferred embodiment of the present invention, a cotton protein or fragment thereof of the present invention is a homologue of a wheat protein.

[0073] In a preferred embodiment of the present invention, the nucleic molecule of the present invention encodes a cotton protein or fragment thereof where a cotton protein or fragment thereof exhibits a BLAST probability score of greater than 1E-12, preferably a BLAST probability score of between about 1E-30 and about 1E-12, even more preferably a BLAST probability score of greater than 1E-30 with its homologue.

[0074] In another preferred embodiment of the present invention, the nucleic acid molecule encoding a cotton protein or fragment thereof exhibits a % identity with its homologue of between about 25% and about 40%, more preferably of between about 40 and about 70%, even more preferably of between about 70% and about 90% and even more preferably between about 90% and 99%. In another preferred embodiment, of the present invention, a cotton protein or fragment thereof exhibits a % identity with its homologue of 100%.

[0075] In a preferred embodiment of the present invention, the nucleic molecule of the present invention encodes a cotton protein or fragment thereof where the cotton protein exhibits a BLAST score of greater than 120, preferably a BLAST score of between about 1450 and about 120, even more preferably a BLAST score of greater than 1450 with its homologue.

[0076] Nucleic acid molecules of the present invention also include non-cotton homologues. Preferred non-cotton homologues are selected from the group consisting of alfalfa, Arabidopsis, barley, Brassica, broccoli, cabbage, citrus, garlic, oat, oilseed rape, onion, canola, flax, an ornamental plant, maize, pea, peanut, pepper, potato, rice, rye, sorghum, soybean, strawberry, sugarcane, sugarbeet, tomato, wheat, poplar, pine, fir, eucalyptus, apple, lettuce, lentils, grape, banana, tea, turf grasses, sunflower, oil palm and Phaseolus.

[0077] The degeneracy of the genetic code, which allows different nucleic acid sequences to code for the same protein or peptide, is known in the literature. (U.S. Pat. No. 4,757,006, the entirety of which is herein incorporated by reference).

[0078] In an aspect of the present invention, one or more of the nucleic acid molecules of the present invention differ in nucleic acid sequence from those encoding a cotton protein or fragment thereof in SEQ ID NO: 1 through SEQ ID NO: 4930 due to the degeneracy in the genetic code in that they encode the same protein but differ in nucleic acid sequence.

[0079] In another further aspect of the present invention, nucleic acid molecules of the present invention can comprise sequences, which differ from those encoding a protein or fragment thereof in SEQ ID NO: 1 through SEQ ID NO: 4930 due to fact that the different nucleic acid sequence encodes a protein having one or more conservative amino acid changes. It is understood that codons capable of coding for such conservative amino acid substitutions are known in the art.

[0080] It is well known in the art that one or more amino acids in a native sequence can be substituted with another amino acid(s), the charge and polarity of which are similar to that of the native amino acid, i.e., a conservative amino acid substitution, resulting in a silent change. Conserved substitutes for an amino acid within the native polypeptide sequence can be selected from other members of the class to which the naturally occurring amino acid belongs. Amino acids can be divided into the following four groups: (1) acidic amino acids, (2) basic amino acids, (3) neutral polar amino acids, and (4) neutral nonpolar amino acids. Representative amino acids within these various groups include, but are not limited to, (1) acidic (negatively charged) amino acids such as aspartic acid and glutamic acid; (2) basic (positively charged) amino acids such as arginine, histidine, and lysine; (3) neutral polar amino acids such as glycine, serine, threonine, cysteine, cystine, tyrosine, asparagine, and glutamine; and (4) neutral nonpolar (hydrophobic) amino acids such as alanine, leucine, isoleucine, valine, proline, phenylalanine, tryptophan, and methionine.

[0081] Conservative amino acid changes within the native polypeptides sequence can be made by substituting one amino acid within one of these groups with another amino acid within the same group. Biologically functional equivalents of the proteins or fragments thereof of the present invention can have 10 or fewer conservative amino acid changes, more preferably seven or fewer conservative amino acid changes, and most preferably five or fewer conservative amino acid changes. The encoding nucleotide sequence will thus have corresponding base substitutions, permitting it to encode biologically functional equivalent forms of the proteins or fragments of the present invention.

[0082] It is understood that certain amino acids may be substituted for other amino acids in a protein structure without appreciable loss of interactive binding capacity with structures such as, for example, antigent-binding regions of antibodies or binding sites on substrate molecules. Because it is the interactive capacity and nature of a protein that defines that protein's biological functional activity, certain amino acid sequence substitutions can be made in a protein sequence and, of course, its underlying DNA coding sequence and, nevertheless, obtain a protein with like properties. It is thus contemplated by the inventors that various changes may be made in the peptide sequences of the proteins or fragments of the present invention, or corresponding DNA sequences that encode said peptides, without appreciable loss of their biological utility or activity. It is understood that codons capable of coding for such amino acid changes are known in the art.

[0083] In making such changes, the hydropathic index of amino acids may be considered. The importance of the hydropathic amino acid index in conferring interactive biological function on a protein is generally understood in the art (Kyte and Doolittle, J. Mol. Biol. 157, 105-132 (1982), herein incorporated by reference in its entirety). It is accepted that the relative hydropathic character of the amino acid contributes to the secondary structure of the resultant protein, which in turn defines the interaction of the protein with other molecules, for example, enzymes, substrates, receptors, DNA, antibodies, antigens, and the like.

[0084] Each amino acid has been assigned a hydropathic index on the basis of its hydrophobicity and charge characteristics (Kyte and Doolittle, 1982); these are isoleucine (+4.5), valine (+4.2), leucine (+3.8), phenylalanine (+2.8), cysteine/cystine (+2.5), methionine (+1.9), alanine (+1.8), glycine (−0.4), threonine (−0.7), serine (−0.8), tryptophan (−0.9), tyrosine (−1.3), proline (−1.6), histidine (−3.2), glutamate (−3.5), glutamine (−3.5), aspartate (−3.5), asparagine (−3.5), lysine (−3.9), and arginine (−4.5).

[0085] In making such changes, the substitution of amino acids whose hydropathic indices are within ±2 is preferred, those which are within ±1 are particularly preferred, and those within ±0.5 are even more particularly preferred.

[0086] It is also understood in the art that the substitution of like amino acids can be made effectively on the basis of hydrophilicity. U.S. Pat. No. 4,554,101, incorporated herein by reference in its entirety, states that the greatest local average hydrophilicity of a protein, as govern by the hydrophilicity of its adjacent amino acids, correlates with a biological property of the protein.

[0087] As detailed in U.S. Pat. No. 4,554,101, the following hydrophilicity values have been assigned to amino acid residues: arginine (+3.0), lysine (+3.0), aspartate (+3.0±1), glutamate (+3.0±1), serine (+0.3), asparagine (+0.2), glutamine (+0.2), glycine (0), threonine (−0.4), proline (−0.5±1), alanine (−0.5), histidine (−0.5), cysteine (−1.0), methionine (−1.3), valine (−1.5), leucine (−1.8), isoleucine (−1.8), tyrosine (−2.3), phenylalanine (−2.5), and tryptophan (−3.4).

[0088] In making such changes, the substitution of amino acids whose hydrophilicity values are within ±2 is preferred, those which are within ±1 are particularly preferred, and those within ±0.5 are even more particularly preferred.

[0089] In a further aspect of the present invention, one or more of the nucleic acid molecules of the present invention differ in nucleic acid sequence from those encoding a cotton protein or fragment thereof set forth in SEQ ID NO: 1 through SEQ ID NO: 4930 or fragment thereof due to the fact that one or more codons encoding an amino acid has been substituted for a codon that encodes a nonessential substitution of the amino acid originally encoded.

[0090] One aspect of the present invention concerns markers that include nucleic acid molecules SEQ ID NO: 1 through SEQ ID NO: 4930 or complements thereof or fragments of either that can act as markers or other nucleic acid molecules of the present invention that can act as markers. Genetic markers of the present invention include “dominant” or “codominant” markers “Codominant markers” reveal the presence of two or more alleles (two per diploid individual) at a locus. “Dominant markers” reveal the presence of only a single allele per locus. The presence of the dominant marker phenotype (e.g., a band of DNA) is an indication that one allele is present in either the homozygous or heterozygous condition. The absence of the dominant marker phenotype (e.g. absence of a DNA band) is merely evidence that “some other” undefined allele is present. In the case of populations where individuals are predominantly homozygous and loci are predominately dimorphic, dominant and codominant markers can be equally valuable. As populations become more heterozygous and multi-allelic, codominant markers often become more informative of the genotype than dominant markers. Marker molecules can be, for example, capable of detecting polymorphisms such as single nucleotide polymorphisms (SNPs).

[0091] SNPs are single base changes in genomic DNA sequence. They occur at greater frequency and are spaced with a greater uniformity throughout a genome than other reported forms of polymorphism. The greater frequency and uniformity of SNPs means that there is greater probability that such a polymorphism will be found near or in a genetic locus of interest than would be the case for other polymorphisms. SNPs are located in protein-coding regions and noncoding regions of a genome. Some of these SNPs may result in defective or variant protein expression (e.g., as a results of mutations or defective splicing). Analysis (genotyping) of characterized SNPs can require only a plus/minus assay rather than a lengthy measurement, permitting easier automation.

[0092] SNPs can be characterized using any of a variety of methods. Such methods include the direct or indirect sequencing of the site, the use of restriction enzymes (Botstein et al., Am. J. Hum. Genet. 32:314-331 (1980), the entirety of which is herein incorporated reference; Konieczny and Ausubel, Plant J. 4:403-410 (1993), the entirety of which is herein incorporated by reference), enzymatic and chemical mismatch assays (Myers et al., Nature 313:495-498 (1985), the entirety of which is herein incorporated by reference), allele-specific PCR (Newton et al., Nucl. Acids Res. 17:2503-2516 (1989), the entirety of which is herein incorporated by reference; Wu et al., Proc. Natl. Acad. Sci. (U.S.A.) 86:2757-2760 (1989), the entirety of which is herein incorporated by reference), ligase chain reaction (Barany, Proc. Natl. Acad. Sci. (U.S.A.) 88:189-193 (1991), the entirety of which is herein incorporated by reference), single-strand conformation polymorphism analysis (Labrune et al., Am. J. Hum. Genet. 48: 1115-1120 (1991), the entirety of which is herein incorporated by reference), primer-directed nucleotide incorporation assays (Kuppuswami et al., Proc. Natl. Acad. Sci. USA 88:1143 -1147 (1991), the entirety of which is herein incorporated by reference), dideoxy fingerprinting (Sarkar et al., Genomics 13:441-443 (1992), the entirety of which is herein incorporated by reference), solid-phase ELISA-based oligonucleotide ligation assays (Nikiforov et al., Nucl. Acids Res. 22:4167-4175 (1994), the entirety of which is herein incorporated by reference), oligonucleotide fluorescence-quenching assays (Livak et al., PCR Methods Appl. 4:357-362 (1995), the entirety of which is herein incorporated by reference), 5′-nuclease allele-specific hybridization TaqMan assay (Livak et al., Nature Genet. 9:341-342 (1995), the entirety of which is herein incorporated by reference), template-directed dye-terminator incorporation (TDI) assay (Chen and Kwok, Nucl. Acids Res. 25:347-353 (1997), the entirety of which is herein incorporated by reference), allele-specific molecular beacon assay (Tyagi et al., Nature Biotech 16: 49-53 (1998), the entirety of which is herein incorporated by reference), PinPoint assay (Haff and Smirnov, Genome Res. 7: 378-388 (1997), the entirety of which is herein incorporated by reference) and dCAPS analysis (Neff et al., Plant J. 14:387-392 (1998), the entirety of which is herein incorporated by reference).

[0093] Additional markers, such as AFLP markers, RFLP markers and RAPD markers, can be utilized (Walton, Seed World 22-29 (July, 1993), the entirety of which is herein incorporated by reference; Burow and Blake, Molecular Dissection of Complex Traits, 13-29, Paterson (ed.), CRC Press, New York (1988), the entirety of which is herein incorporated by reference). DNA markers can be developed from nucleic acid molecules using restriction endonucleases, the PCR and/or DNA sequence information. RFLP markers result from single base changes or insertions/deletions. These codominant markers are highly abundant in plant genomes, have a medium level of polymorphism and are developed by a combination of restriction endonuclease digestion and Southern blotting hybridization. CAPS are similarly developed from restriction nuclease digestion but only of specific PCR products. These markers are also codominant, have a medium level of polymorphism and are highly abundant in the genome. The CAPS result from single base changes and insertions/deletions.

[0094] Another marker type, RAPDs, are developed from DNA amplification with random primers and result from single base changes and insertions/deletions in plant genomes. They are dominant markers with a medium level of polymorphisms and are highly abundant. AFLP markers require using the PCR on a subset of restriction fragments from extended adapter primers. These markers are both dominant and codominant are highly abundant in genomes and exhibit a medium level of polymorphism.

[0095] SSRs require DNA sequence information. These codominant markers result from repeat length changes, are highly polymorphic and do not exhibit as high a degree of abundance in the genome as CAPS, AFLPs and RAPDs, SNPs also require DNA sequence information. These codominant markers result from single base substitutions. They are highly abundant and exhibit a medium of polymorphism (Rafalski et al., In: Nonmammalian Genomic Analysis, Birren and Lai (ed.), Academic Press, San Diego, Calif., pp. 75-134 (1996), the entirety of which is herein incorporated by reference). It is understood that a nucleic acid molecule of the present invention may be used as a marker.

[0096] A PCR probe is a nucleic acid molecule capable of initiating a polymerase activity while in a double-stranded structure with another nucleic acid. Various methods for determining the structure of PCR probes and PCR techniques exist in the art. Computer generated searches using programs such as Primer3 (www-genome.wi.mit.edu/cgi-bin/primer/primer3.cgi), STSPipeline (www-genome.wi.mit.edu/cgi-bin/www-STS Pipeline), or GeneUp (Pesole et al., BioTechniques 25:112-123 (1998) the entirety of which is herein incorporated by reference), for example, can be used to identify potential PCR primers.

[0097] It is understood that a fragment of one or more of the nucleic acid molecules of the present invention may be a probe and specifically a PCR probe.

[0098] (b) Protein and Peptide Molecules

[0099] A class of agents comprises one or more of the protein or peptide molecules encoded by SEQ ID NO: 1 through SEQ ID NO:4930 or one or more of the protein or fragment thereof or peptide molecules encoded by other nucleic acid agents of the present invention. As used herein, the term “protein molecule” or “peptide molecule” includes any molecule that comprises five or more amino acids. It is well know in the art that proteins may undergo modification, including post-translational modifications, such as, but not limited to, disulfide bond formation, glycosylation, phosphorylation, or oligomerization. Thus, as used herein, the term “protein molecule” or “peptide molecule” includes any protein molecule that is modified by any biological or non-biological process. The terms “amino acid” and “amino acids” refer to all naturally occurring L-amino acids. This definition is meant to include norleucine, ornithine, homocysteine, and homoserine.

[0100] One or more of the protein or fragment of peptide molecules may be produced via chemical synthesis, or more preferably, by expression in a suitable bacterial or eukaryotic host. Suitable methods for expression are described by Sambrook, et al., (In: Molecular Cloning, A Laboratory Manual, 2nd Edition, Cold Spring Harbor Press, Cold Spring Harbor, N.Y. (1989)), or similar texts.

[0101] A “protein fragment” is a peptide or polypeptide molecule whose amino acid sequence comprises a subset of the amino acid sequence of that protein. A protein or fragment thereof that comprises one or more additional peptide regions not derived from that protein is a “fusion” protein. Such molecules may be derivatized to contain carbohydrate or other moieties (such as keyhole limpet hemocyanin, etc.). Fusion protein or peptide molecule of the present invention are preferably produced via recombinant means.

[0102] Another class of agents comprise protein or peptide molecules encoded by SEQ ID NO: 1 through SEQ ID NO:4930 or complements thereof or, fragments or fusions thereof in which non-essential, or not relevant, amino acid residues have been added, replaced, or deleted. An example of such a homologue is the homologue protein of all non-cotton plant species, including but not limited to alfalfa, Arabidopsis, barley, Brassica, broccoli, cabbage, citrus, garlic, oat, oilseed rape, onion, canola, flax, maize, an ornamental plant, pea, peanut, pepper, potato, rice, rye, sorghum, soybean, strawberry, sugarcane, sugarbeet, tomato, wheat, poplar, pine, fir, eukalyptus, apple, lettuce, peas, lentils, grape, banana, tea, turf grasses, etc. Particularly preferred non-cotton plants to utilize for the isolation of homologues would include alfalfa, Arabidopsis, barley, oat, oilseed rape, rice, canola, maize, ornamentals, soybean, sugarcane, sugarbeet, tomato, potato, wheat, and turf grasses. Such a homologue can be obtained by any of a variety of methods. Most preferably, as indicated above, one or more of the disclosed sequences (SEQ ID NO: 1 through SEQ ID NO:4930 or complements thereof) will be used to define a pair of primers that may be used to isolate the homologue-encoding nucleic acid molecules from any desired species. Such molecules can be expressed to yield homologues by recombinant means.

[0103] (c) Antibodies

[0104] One aspect of the present invention concerns antibodies, single-chain antigen binding molecules, or other proteins that specifically bind to one or more of the protein or peptide molecules of the present invention and their homologues, fusions or fragments. Such antibodies may be used to quantitatively or qualitatively detect the protein or peptide molecules of the present invention. As used herein, an antibody or peptide is said to “specifically bind” to a protein or peptide molecule of the present invention if such binding is not competitively inhibited by the presence of non-related molecules.

[0105] Nucleic acid molecules that encode all or part of the protein of the present invention can be expressed, via recombinant means, to yield protein or peptides that can in turn be used to elicit antibodies that are capable of binding the expressed protein or peptide. Such antibodies may be used in immunoassays for that protein. Such protein-encoding molecules, or their fragments may be a “fusion” molecule (i.e., a part of a larger nucleic acid molecule) such that, upon expression, a fusion protein is produced. It is understood that any of the nucleic acid molecules of the present invention may be expressed, via recombinant means, to yield proteins or peptides encoded by these nucleic acid molecules.

[0106] The antibodies that specifically bind proteins and protein fragments of the present invention may be polyclonal or monoclonal, and may comprise intact immunoglobulins, or antigen binding portions of immunoglobulins (such as (F(ab′), F(ab′)₂) fragments, or single-chain immunoglobulins producible, for example, via recombinant means). It is understood that practitioners are familiar with the standard resource materials which describe specific conditions and procedures for the construction, manipulation and isolation of antibodies (see, for example, Harlow and Lane, In Antibodies: A Laboratory Manual, Cold Spring Harbor Press, Cold Spring Harbor, N.Y. (1988), the entirety of which is herein incorporated by reference).

[0107] Murine monoclonal antibodies are particularly preferred. BALB/c mice are preferred for this purpose, however, equivalent strains may also be used. The animals are preferably immunized with approximately 25 μg of purified protein (or fragment thereof) that has been emulsified a suitable adjuvant (such as TiterMax adjuvant (Vaxcel, Norcross, Ga.)). Immunization is preferably conducted at two intramuscular sites, one intraperitoneal site, and one subcutaneous site at the base of the tail. An additional i.v. injection of approximately 25 μg of antigen is preferably given in normal saline three weeks later. After approximately 11 days following the second injection, the mice may be bled and the blood screened for the presence of anti-protein or peptide antibodies. Preferably, a direct binding Enzyme-Linked Immunoassay (ELISA) is employed for this purpose.

[0108] More preferably, the mouse having the highest antibody titer is given a third i.v. injection of approximately 25 μg of the same protein or fragment. The splenic leukocytes from this animal may be recovered 3 days later, and are then permitted to fuse, most preferably, using polyethylene glycol, with cells of a suitable myeloma cell line (such as, for example, the P3X63Ag8.653 myeloma cell line). Hybridoma cells are selected by culturing the cells under “HAT” (hypoxanthine-aminopterin-thymine) selection for about one week. The resulting clones may then be screened for their capacity to produce monoclonal antibodies (“mAbs), preferably by direct ELISA.

[0109] In one embodiment, anti-protein or peptide monoclonal antibodies are isolated using a fusion of a protein, protein fragment, or peptide of the present invention, or conjugate of a protein, protein fragment, or peptide of the present invention, as immunogens. Thus, for example, a group of mice can be immunized using a fusion protein emulsified in Freund's complete adjuvant (e.g. approximately 50 μg of antigen per immunization). At three week intervals, an identical amount of antigen is emulsified in Freund's incomplete adjuvant and used to immunize the animals. Ten days following the third immunization, serum samples are taken and evaluated for the presence of antibody. If antibody titers are too low, a fourth booster can be employed. Polysera capable of binding the protein or peptide can also be obtained using this method.

[0110] In a preferred procedure for obtaining monoclonal antibodies, the spleens of the above-described immunized mice are removed, disrupted, and immune splenocytes are isolated over a ficoll gradient. The isolated splenocytes are fused, using polyethylene glycol with BALB/c-derived HGPRT (hypoxanthine guanine phosphoribosyl transferase) deficient P3x63xAg8.653 plasmacytoma cells. The fused cells are plated into 96-well microtiter plates and screened for hybridoma fusion cells by their capacity to grow in culture medium supplemented with hypothanthine, aminopterin and thymidine for approximately 2-3 weeks.

[0111] Hybridoma cells that arise from such incubation are preferably screened for their capacity to produce an immunoglobulin that binds to a protein of interest. An indirect ELISA may be used for this purpose. In brief, the supernatants of hybridomas are incubated in microtiter wells that contain immobilized protein. After washing, the titer of bound immunoglobulin can be determined using, for example, a goat anti-mouse antibody conjugated to horseradish peroxidase. After additional washing, the amount of immobilized enzyme is determined (for example through the use of a chromogenic substrate). Such screening is performed as quickly as possible after the identification of the hybridoma in order to ensure that a desired clone is not overgrown by non-secreting neighbors. Desirably, the fusion plates are screened several times since the rates of hybridoma growth vary. In a preferred sub-embodiment, a different antigenic form of immunogen may be used to screen the hybridoma. Thus, for example, the splenocytes may be immunized with one immunogen, but the resulting hybridomas can be screened using a different immunogen. It is understood that any of the protein or peptide molecules of the present invention may be used to raise antibodies.

[0112] As discussed below, such antibody molecules or their fragments may be used for diagnostic purposes. Where the antibodies are intended for diagnostic purposes, it may be desirable to derivative them, for example with a ligand group (such as biotin) or a detectable marker group (such as a fluorescent group, a radioisotope or an enzyme).

[0113] The ability to produce antibodies that bind the protein or peptide molecules of the present invention permits the identification of mimetic compounds of those molecules. A “mimetic compound” is a compound that is not that compound, or a fragment of that compound, but which nonetheless exhibits an ability to specifically bind to antibodies directed against that compound.

[0114] It is understood that any of the agents of the present invention can be substantially purified and/or be biologically active and/or recombinant.

[0115] Uses of the Agents of the Invention

[0116] The nucleic acid molecules and fragments thereof of the present invention from the cDNA library LIB3493 are isolated from cotton male reproductive tissue from open flowers, which are harvested from 2-3 month old cotton plants. The ESTs of the present invention can enable the acquisition of, including but not limited to, genes involved in floral and square development, reproduction, male gamete production and development, pollination, seed production, fiber production and development, and boll development therefore, the ESTs of the present invention will find great use in the isolation of a variety of agronomically significant genes, including but not limited to, non-regulatory genes and genes that regulate microsporogenesis, meiosis, cell cycle, signal transduction, cell-cell communication, carotenoids, floral biogenesis, fibers, proteins, amino acids, sterols, oils, minerals, isoflavones, saponins, vitamins, tocopherols, antinutrient components, carbohydrates, starch metabolism, and seed composition and function. Such genes are associated with plant growth, yield and fiber quality, and could also serve as links in important developmental, metabolic, and catabolic pathways. Libraries from this tissue can enable the acquisition of a variety of agronomically significant genes involved in the synthesis and catabolism of commercially important traits. The ESTs of the present invention also can enable the acquisition of promoters and cis-regulatory elements which will be useful to express agronomically significant genes in these tissues and/or other tissues. The ESTs of the present invention also can enable the acquisition of molecular markers, which can be used in, including but not limited to, breeding schemes, genetic and molecular mapping, and cloning of agronomically significant genes.

[0117] Nucleic acid molecules and fragments thereof of the present invention may be employed to obtain other nucleic acid molecules. Such molecules include the nucleic acid molecules of other plants or other organisms (e.g., alfalfa, rice, potato, soybean, oat, rye, barley, maize, wheat, Arabidopsis, Brassica, etc.) including the nucleic acid molecules that encode, in whole or in part, protein homologues of other plant species or other organisms, and sequences of genetic elements such as promoters and transcriptional regulatory elements. Such molecules can be readily obtained by using the above-described nucleic acid molecules or fragments thereof to screen cDNA or genomic libraries obtained from such plant species. Methods for forming such libraries are well known in the art. Such homologue molecules may differ in their nucleotide sequences from those found in one or more of SEQ ID NO:1 through SEQ ID NO:4930 or complements thereof because complete complementarity is not needed for stable hybridization. The nucleic acid molecules of the present invention therefore also include molecules that, although capable of specifically hybridizing with the nucleic acid molecules may lack “complete complementarity.”

[0118] Any of a variety of methods may be used to obtain one or more of the above-described nucleic acid molecules (Zamechik et al., Proc. Natl. Acad. Sci. (U.S.A.) 83:4143-4146 (1986); Goodchild et al., Proc. Natl. Acad. Sci. (U.S.A.) 85:5507-5511 (1988); Wickstrom et al., Proc. Natl. Acad. Sci. (U.S.A.) 85:1028-1032 (1988); Holt, et al., Molec. Cell. Biol. 8:963-973 (1988); Gerwirtz, et al., Science 242:1303-1306 (1988); Anfossi, et al., Proc. Natl. Acad. Sci. (U.S.A.) 86:3379-3383 (1989); Becker, et al., EMBO J. 8:3685-3691 (1989); all of which are herein incorporated by reference in their entirety). Automated nucleic acid synthesizers may be employed for this purpose. In lieu of such synthesis, the disclosed nucleic acid molecules may be used to define a pair of primers that can be used with the polymerase chain reaction (Mullis, et al., Cold Spring Harbor Symp. Quant. Biol. 51:263-273 (1986); Erlich et al., EP 50,424; EP 84,796, EP 258,017, EP 237,362; Mullis, EP 201,184; Mullis et al., U.S. Pat. No. 4,683,202; Erlich, U.S. Pat. No. 4,582,788; and Saiki, R. et al., U.S. Pat. No. 4,683,194, all of which are herein incorporated by reference in their entirety) to amplify and obtain any desired nucleic acid molecule or fragment.

[0119] Promoter sequence(s) and other genetic elements including but not limited to transcriptional regulatory elements associated with one or more of the disclosed nucleic acid sequences can also be obtained using the disclosed nucleic acid sequences provided herein.

[0120] In one embodiment, such sequences are obtained by incubating EST nucleic acid molecules or preferably fragments thereof with members of genomic libraries (e.g. maize and soybean) and recovering clones that hybridize to the EST nucleic acid molecule or fragment thereof. In a second embodiment, methods of “chromosome walking,” or inverse PCR may be used to obtain such sequences (Frohman, et al., Proc. Natl. Acad. Sci. (U.S.A.) 85:8998-9002 (1988); Ohara, et al., Proc. Natl. Acad. Sci (U.S.A.) 86: 5673-5677 (1989); Pang et al., Biotechniques, 22(6); 1046-1048 (1977); Huang et al., Methods Mol. Biol. 69: 89-96 (1977); Hartl et al., Methods Mol. Biol. 58: 293-301 (1996), all of which are hereby incorporated by reference in their entirety). In one embodiment, the disclosed nucleic acid molecules are used to identify cDNAs whose analogous genes contain promoters with desirable expression patterns. The nucleic acid molecules isolated from the library of the present invention are used to isolate promoters of tissue-enhanced, tissue-specific, developmentally- or environmentally-regulated expression profiles. Isolation and functional analysis of the 5′ flanking promoter sequences of these genes from genomic libraries, for example, using genomic screening methods and PCR techniques would result in the isolation of useful promoters and transcriptional regulatory elements. These methods are known to those of skill in the art and have been described (See for example Birren et al., Genome Analysis:Analyzing DNA, 1, (1997), Cold Spring Harbor Laboratory Press, Cold Spring Harbor, N.Y., the entirety of which is herein incorporated by reference).

[0121] Promoters obtained utilizing the nucleic acid molecules of the present invention could also be modified to affect their control characteristics. Examples of such modifications would include but are not limited to enhancer sequences as reported by Kay et al., Science 236:1299 (1987), herein incorporated by reference in its entirety. Such genetic elements could be used to enhance gene expression of new and existing traits for crop improvements.

[0122] The nucleic acid molecules of the present invention may be used to isolate promoters of tissue enhanced. tissue specific, cell-specific, cell-type, developmentally or environmentally regulated expression profiles. Isolation and functional analysis of the 5′ flanking promoter sequences of these genes from genomic libraries, for example, using genomic screening methods and PCR techniques would result in the isolation of useful promoters and transcriptional regulatory elements. These methods are known to those of skill in the art and have been described (See, for example, Birren et. al., Genome Analysis: Analyzing DNA, 1, Cold Spring Harbor Laboratory Press, Cold Spring Harbor, N.Y. (1997), herein incorporated by reference in its entirety). Promoters obtained utilizing the nucleic acid molecules of the present invention could also be modified to affect their control characteristics. Examples of such modifications would include but are not limited to enhancer sequences as reported by Kay, et al Science 236:1299(1987), herein incorporated reference in its entirety. Such genetic elements could be used to enhance gene expression of new and existing traits for crop improvements.

[0123] In an aspect of the present invention, one or more of the nucleic molecules of the present invention are used to determine whether a plant (preferably cotton) has a mutation affecting the level (i.e., the concentration of mRNA in a sample, etc.) or pattern (i.e., the kinetics of expression, rate of decomposition, stability profile, etc.) of the expression encoded in part or whole by one or more of the nucleic acid molecules of the present invention (collectively, the “Expression Response” of a cell or tissue). As used herein, the Expression Response manifested by a cell or tissue is said to be “altered” if it differs from the Expression Response of cells or tissues of plants not exhibiting the phenotype. To determine whether a Expression Response is altered, the Expression Response manifested by the cell or tissue of the plant exhibiting the phenotype is compared with that of a similar cell or tissue sample of a plant not exhibiting the phenotype. As will be appreciated, it is not necessary to re-determine the Expression Response of the cell or tissue sample of plants not exhibiting the phenotype each time such a comparison is made; rather, the Expression Response of a particular plant may be compared with previously obtained values of normal plants. As used herein, the phenotype of the organism is any of one or more characteristics of an organism (e.g. disease resistance, pest tolerance, environmental tolerance, male sterility, yield, quality improvements, etc.). A change in genotype or phenotype may be transient or permanent. Also as used herein, a tissue sample is any sample that comprises more than one cell. In a preferred aspect, a tissue sample comprises cells that share a common characteristic (e.g. derived from leaf, root, or pollen etc).

[0124] In one sub-aspect, such an analysis is conducted by determining the presence and/or identity of polymorphism(s) by one or more of the nucleic acid molecules of the present invention and more specifically, one or more of the EST nucleic acid molecules or fragments thereof which are associated with phenotype, or a predisposition to phenotype.

[0125] Any of a variety of molecules can be used to identify such polymorphism(s). In one embodiment, one or more of the EST nucleic acid molecules (or a sub-fragment thereof) may be employed as a marker nucleic acid molecule to identify such polymorphism(s). Alternatively, such polymorphisms can be detected through the use of a marker nucleic acid molecule or a marker protein that is genetically linked to (i.e., a polynucleotide that co-segregates with) such polymorphism(s).

[0126] In an alternative embodiment, such polymorphisms can be detected through the use of a marker nucleic acid molecule that is physically linked to such polymorphism(s). For this purpose, marker nucleic acid molecules comprising a nucleotide sequence of a polynucleotide located within 1 mb of the polymorphism(s), and more preferably within 100 kb of the polymorphism(s), and most preferably within 10 kb of the polymorphism(s) can be employed.

[0127] The genomes of animals and plants naturally undergo spontaneous mutation in the course of their continuing evolution (Gusella, Ann. Rev. Biochem. 55:831-854 (1986)). A “polymorphism” is a variation or difference in the sequence of the gene or its flanking regions that arises in some of the members of a species. The variant sequence and the “original” sequence co-exist in the species' population. In some instances, such co-existence is in stable or quasi-stable equilibrium.

[0128] A polymorphism is thus said to be “allelic,” in that, due to the existence of the polymorphism, some members of a species may have the original sequence (i.e., the original “allele”) whereas other members may have the variant sequence (i.e., the variant “allele”). In the simplest case, only one variant sequence may exist, and the polymorphism is thus said to be di-allelic. In other cases, the species' population may contain multiple alleles, and the polymorphism is termed tri-allelic, etc. A single gene may have multiple different unrelated polymorphisms. For example, it may have a di-allelic polymorphism at one site, and a multi-allelic polymorphism at another site.

[0129] The variation that defines the polymorphism may range from a single nucleotide variation to the insertion or deletion of extended regions within a gene. In some cases, the DNA sequence variations are in regions of the genome that are characterized by short tandem repeats (STRs) that include tandem di- or tri-nucleotide repeated motifs of nucleotides. Polymorphisms characterized by such tandem repeats are referred to as “variable number tandem repeat” (“VNTR”) polymorphisms. VNTRs have been used in identity analysis (Weber, U.S. Pat. No. 5,075,217; Armour, et al., FEBS Lett. 307:113-115 (1992); Jones, et al., Eur. J. Haematol. 39:144-147 (1987); Horn, et al., PCT Application WO91/14003; Jeffreys, European Patent Application 370,719; Jeffreys, U.S. Pat. No. 5,699,082; Jeffreys. et al., Amer. J. Hum. Genet. 39:11-24 (1986); Jeffreys. et al., Nature 316:76-79 (1985); Gray, et al., Proc. R Acad. Soc. Lond. 243:241-253 (1991); Moore, et al., Genomics 10:654-660 (1991); Jeffreys, et al., Anim. Genet. 18:1-15 (1987); Hillel, et al., Anim. Genet. 20:145-155 (1989); Hillel, et al., Genet. 124:783-789 (1990), all of which are herein incorporated by reference in their entirety).

[0130] The detection of polymorphic sites in a sample of DNA may be facilitated through the use of nucleic acid amplification methods. Such methods specifically increase the concentration of polynucleotides that span the polymorphic site, or include that site and sequences located either distal or proximal to it. Such amplified molecules can be readily detected by gel electrophoresis or other means.

[0131] The most preferred method of achieving such amplification employs the polymerase chain reaction (“PCR”) (Mullis, et al., Cold Spring Harbor Symp. Quant. Biol. 51:263-273 (1986); Erlich, et al., European Patent Appln. 50,424; European Patent Appln. 84,796, European Patent Application 258,017, European Patent Appln. 237,362; Mullis, European Patent Appln. 201,184; Mullis, et al., U.S. Pat. No. 4,683,202; Erlich., U.S. Pat. No. 4,582,788; and Saiki, et al., U.S. Pat. No. 4,683,194, all of which are herein incorporated by reference), using primer pairs that are capable of hybridizing to the proximal sequences that define a polymorphism in its double-stranded form.

[0132] In lieu of PCR, alternative methods, such as the “Ligase Chain Reaction” (“LCR”) may be used (Barany, Proc. Natl. Acad. Sci. (U.S.A.) 88:189-193 (1991), the entirety of which is herein incorporated by reference). LCR uses two pairs of oligonucleotide probes to exponentially amplify a specific target. The sequences of each pair of oligonucleotides is selected to permit the pair to hybridize to abutting sequences of the same strand of the target. Such hybridization forms a substrate for a template-dependent ligase. As with PCR, the resulting products thus serve as a template in subsequent cycles and an exponential amplification of the desired sequence is obtained.

[0133] LCR can be performed with oligonucleotides having the proximal and distal sequences of the same strand of a polymorphic site. In one embodiment, either oligonucleotide will be designed to include the actual polymorphic site of the polymorphism. In such an embodiment, the reaction conditions are selected such that the oligonucleotides can be ligated together only if the target molecule either contains or lacks the specific nucleotide that is complementary to the polymorphic site present on the oligonucleotide. Alternatively, the oligonucleotides may be selected such that they do not include the polymorphic site (see, Segev, PCT Application WO 90/01069, the entirety of which is herein incorporated by reference).

[0134] The “Oligonucleotide Ligation Assay” (“OLA”) may alternatively be employed (Landegren, et al., Science 241:1077-1080 (1988), herein incorporated by reference in its entirety). The OLA protocol uses two oligonucleotides which are designed to be capable of hybridizing to abutting sequences of a single strand of a target. OLA, like LCR, is particularly suited for the detection of point mutations. Unlike LCR, however, OLA results in “linear” rather than exponential amplification of the target sequence.

[0135] Nickerson, et al. have described a nucleic acid detection assay that combines attributes of PCR and OLA (Nickerson, et al., Proc. Natl. Acad. Sci. (U.S.A.) 87:8923-8927 (1990), the entirety of which is herein incorporated by reference). In this method, PCR is used to achieve the exponential amplification of target DNA, which is then detected using OLA. In addition to requiring multiple, and separate, processing steps, one problem associated with such combinations is that they inherit all of the problems associated with PCR and OLA.

[0136] Schemes based on ligation of two (or more) oligonucleotides in the presence of nucleic acid having the sequence of the resulting “di-oligonucleotide”, thereby amplifying the di-oligonucleotide, are also known (Wu, et al., Genomics 4:560 (1989), the entirety of which is herein incorporated by reference), and may be readily adapted to the purposes of the present invention.

[0137] Other known nucleic acid amplification procedures, such as allele-specific oligomers, branched DNA technology, transcription-based amplification systems, or isothermal amplification methods may also be used to amplify and analyze such polymorphisms (Malek, et al., U.S. Pat. No. 5,130,238; Davey, et al., European Patent Application 329,822; Schuster et al., U.S. Pat. No. 5,169,766; Miller, et al., PCT Application WO 89/06700; Kwoh, et al., Proc. Natl. Acad. Sci. (U.S.A.) 86:1173-1177 (1989); Gingeras, et al., PCT Application WO 88/10315; Walker, et al., Proc. Natl. Acad. Sci. (U.S.A.) 89:392-396 (1992), all of which are herein incorporated by reference in their entirety).

[0138] The identification of a polymorphism can be determined in a variety of ways. By correlating the presence or absence of it in a plant with the presence or absence of a phenotype, it is possible to predict the phenotype of that plant. If a polymorphism creates or destroys a restriction endonuclease cleavage site, or if it results in the loss or insertion of DNA (e.g., a VNTR polymorphism), it will alter the size or profile of the DNA fragments that are generated by digestion with that restriction endonuclease. As such, individuals that possess a variant sequence can be distinguished from those having the original sequence by restriction fragment analysis. Polymorphisms that can be identified in this manner are termed “restriction fragment length polymorphisms” (“RFLPs”). RFLPs have been widely used in human and plant genetic analyses (Glassberg, UK Patent Application 2135774; Skolnick, et al., Cytogen. Cell Genet. 32:58-67 (1982); Botstein, et al., Ann. J. Hum. Genet. 32:314-331 (1980); Fischer, et al. (PCT Application WO90/13668); Uhlen, PCT Application WO90/11369).

[0139] Polymorphisms can also be identified by Single Strand Conformation Polymorphism (SSCP) analysis. The SSCP technique is a method capable of identifying most sequence variations in a single strand of DNA, typically between 150 and 250 nucleotides in length (Elles, Methods in Molecular Medicine: Molecular Diagnosis of Genetic Diseases, Humana Press (1996); Orita et al., Genomics 5: 874-879 (1989), both of which are herein incorporated by reference in their entirety). Under denaturing conditions a single strand of DNA will adopt a conformation that is uniquely dependent on its sequence conformation. This conformation usually will be different, even if only a single base is changed. Most conformations have been reported to alter the physical configuration or size sufficiently to be detectable by electrophoresis. A number of protocols have been described for SSCP including, but not limited to Lee et al., Anal. Biochem. 205: 289-293 (1992), herein incorporated by reference in its entirety; Suzuki et al., Anal. Biochem. 192: 82-84 (1991), herein incorporated by reference in its entirety; Lo et al., Nucleic Acids Research 20: 1005-1009 (1992), herein incorporated by reference in its entirety, Sarkar et al., Genomics 13: 441-443 (1992), herein incorporated by reference in its entirety). It is understood that one or more of the nucleic acids of the present invention, may be utilized as markers or probes to detect polymorphisms by SSCP analysis.

[0140] Polymorphisms may also be found using a DNA fingerprinting technique called amplified fragment length polymorphism (AFLP), which is based on the selective PCR amplification of restriction fragments from a total digest of genomic DNA to profile that DNA. Vos, et al., Nucleic Acids Res. 23:4407-4414 (1995), the entirety of which is herein incorporated by reference. This method allows for the specific co-amplification of high numbers of restriction fragments, which can be visualized by PCR without knowledge of the nucleic acid sequence.

[0141] AFLP employs basically three steps. Initially, a sample of genomic DNA is cut with restriction enzymes and oligonucleotide adapters are ligated to the restriction fragments of the DNA. The restriction fragments are then amplified using PCR by using the adapter and restriction sequence as target sites for primer annealing. The selective amplification is achieved by the use of primers that extend into the restriction fragments, amplifying only those fragments in which the primer extensions match the nucleotide flanking the restriction sites. These amplified fragments are then visualized on a denaturing polyacrylamide gel.

[0142] AFLP analysis has been performed on Salix (Beismann, et al., Mol. Ecol. 6:989-993 (1997), the entirety of which is herein incorporated by reference); Acinetobacter (Janssen, et al., Int. J. Syst. Bacteriol 47:1179-1187 (1997), the entirety of which is herein incorporated by reference), Aeromonas popoffi (Huys, et al., Int. J. Syst. Bacteriol. 47:1165-1171 (1997), the entirety of which is herein incorporated by reference), rice (McCouch, et al., Plant Mol. Biol. 35:89-99 (1997), the entirety of which is herein incorporated by reference); Nandi, et al., Mol. Gen. Genet. 255:1-8 (1997); Cho, et al., Genome 39:373-378 (1996), herein incorporated by reference), barley (Hordeum vulgare)(Simons, et al., Genomics 44:61-70 (1997), the entirety of which is herein incorporated by reference; Waugh, et al., Mol. Gen. Genet. 255:311-321 (1997), the entirety of which is herein incorporated by reference; Qi, et al., Mol. Gen Genet. 254:330-336 (1997), the entirety of which is herein incorporated by reference; Becker, et al., Mol. Gen. Genet 249:65-73 (1995), the entirety of which is herein incorporated by reference), potato (Van der Voort, et al., Mol. Gen. Genet. 255:438-447 (1997), the entirety of which is herein incorporated by reference; Meksem, et al., Mol. Gen. Genet 249:74-81 (1995), the entirety of which is herein incorporated by reference), Phytophthora infestans (Van der Lee, et al., Fungal Genet. Biol. 21:278-291 (1997), the entirety of which is herein incorporated by reference), Bacillus anthracis (Keim, et al., J. Bacteriol. 179:818-824 (1997)), Astragalus cremnophylax (Travis, et al., Mol. Ecol. 5:735-745 (1996), the entirety of which is herein incorporated by reference), Arabidopsis (Cnops, et al., Mol. Gen. Genet. 253:32-41 (1996), the entirety of which is herein incorporated by reference), Escherichia coli (Lin, et al., Nucleic Acids Res. 24:3649-3650 (1996), the entirety of which is herein incorporated by reference), Aeromonas (Huys, et al., Int. J. Syst. Bacteriol. 46:572-580 (1996), the entirety of which is herein incorporated by reference), nematode (Folkertsma, et al., Mol. Plant Microbe Interact. 9:47-54 (1996), the entirety of which is herein incorporated by reference), tomato (Thomas, et al., Plant J. 8:785-794 (1995), the entirety of which is herein incorporated by reference), and human (Latorra, et al., PCR Methods Appl. 3:351-358 (1994)). AFLP analysis has also been used for fingerprinting mRNA (Money, et al., Nucleic Acids Res. 24:2616-2617 (1996), the entirety of which is herein incorporated by reference; Bachem, et al., Plant J. 9:745-753 (1996), the entirety of which is herein incorporated by reference). It is understood that one or more of the nucleic acids of the present invention, may be utilized as markers or probes to detect polymorphisms by AFLP analysis for fingerprinting mRNA.

[0143] Polymorphisms may also be found using random amplified polymorphic DNA (RAPD) (Williams et al., Nucl. Acids Res. 18: 6531-6535 (1990), the entirety of which is herein incorporated by reference) and cleaveable amplified polymorphic sequences (CAPS) (Lyamichev et al., Science 260: 778-783 (1993), the entirety of which is herein incorporated by reference). It is understood that one or more of the nucleic acids of the present invention, may be utilized as markers or probes to detect polymorphisms by RAPD or CAPS analysis.

[0144] Polymorphisms are useful, through linkage analysis, to define the genetic distances or physical distances between polymorphic traits. A physical map or ordered array of genomic DNA fragments in the desired region containing the gene may be used to characterize and isolate genes corresponding to desirable traits. For this purpose, yeast artificial chromosomes (YACs), bacterial artificial chromosomes (BACs), and cosmids are appropriate vectors for cloning large segments of DNA molecules. Although fewer clones are needed to make a contig for a specific genomic region by using YACs (Agyare et al., Genome Res. 7: 1-9 (1997), the entirety of which is herein incorporated by reference; James et al., Genomics 32: 425-430 (1996), the entirety of which is herein incorporated by reference), chimerism in the inserted DNA fragment can arise. Cosmids are convenient for handling smaller-size DNA molecules and may be used for transformation in developing transgenic plants. BACs also carry DNA fragments and are less prone to chimerism.

[0145] Through genetic mapping, a fine scale linkage map can be developed using DNA markers and, then, a genomic DNA library of large-sized fragments can be screened with molecular markers linked to the desired trait. Molecular markers are advantageous for agronomic traits that are otherwise difficult to tag, such as resistance to pathogens, insects and nematodes, tolerance to abiotic stress, quality parameters and quantitative traits such as high yield potential.

[0146] The essential requirements for marker-assisted selection in a plant breeding program are: (1) the marker(s) should co-segregate or be closely linked with the desired trait; (2) an efficient means of screening large populations for the molecular marker(s) should be available; and (3) the screening technique should have high reproducibility across laboratories and preferably be economical to use and be user-friendly.

[0147] The genetic linkage of marker molecules can be established by a gene mapping model such as, without limitation, the flanking marker model reported by Lander and Botstein, Genetics 121:185-199 (1989) and the interval mapping, based on maximum likelihood methods described by Lander and Botstein, Genetics 121:185-199 (1989) and implemented in the software package MAPMAKER/QTL (Lincoln and Lander, Mapping Genes Controlling Quantitative Traits Using MAPMAKER/QTL, Whitehead Institute for Biomedical Research, Mass., (1990). Additional software includes Qgene, Version 2.23 (1996), Department of Plant Breeding and Biometry, 266 Emerson Hall, Cornell University, Ithaca, N.Y., the manual of which is herein incorporated by reference in its entirety). Use of Qgene software is a particularly preferred approach.

[0148] A maximum likelihood estimate (MLE) for the presence of a marker is calculated, together with an MLE assuming no QTL effect, to avoid false positives. A log₁₀ of an odds ratio (LOD) is then calculated as: LOD=log₁₀ (MLE for the presence of a QTL/MLE given no linked QTL).

[0149] The LOD score essentially indicates how much more likely the data are to have arisen assuming the presence of a QTL than in its absence. The LOD threshold value for avoiding a false positive with a given confidence, say 95%, depends on the number of markers and the length of the genome. Graphs indicating LOD thresholds are set forth in Lander and Botstein, Genetics 121:185-199 (1989) the entirety of which is herein incorporated by reference and further described by Arús and Moreno-González, Plant Breeding, Hayward et al., (eds.) Chapman & Hall, London, pp. 314-331 (1993), the entirety of which is herein incorporated by reference.

[0150] Additional models can be used. Many modifications and alternative approaches to interval mapping have been reported, including the use of non-parametric methods (Kruglyak and Lander, Genetics 139:1421-1428 (1995), the entirety of which is herein incorporated by reference). Multiple regression methods or models can be also be used, in which the trait is regressed on a large number of markers (Jansen, Biometrics in Plant Breeding, van Oijen and Jansen (eds.), Proceedings of the Ninth Meeting of the Eucarpia Section Biometrics in Plant Breeding, The Netherlands, pp. 116-124 (1994); Weber and Wricke, Advances in Plant Breeding, Blackwell, Berlin, 16 (1994), both of which are herein incorporated by reference in their entirety). Procedures combining interval mapping with regression analysis, whereby the phenotype is regressed onto a single putative QTL at a given marker interval and at the same time onto a number of markers that serve as ‘cofactors,’ have been reported by Jansen and Stam, Genetics 136:1447-1455 (1994), herein incorporated by reference in its entirety and Zeng, Genetics 136:1457-1468 (1994) herein incorporated by reference in its entirety. Generally, the use of cofactors reduces the bias and sampling error of the estimated QTL positions (Utz and Melchinger, Biometrics in Plant Breeding, van Oijen and Jansen (eds.) Proceedings of the Ninth Meeting of the Eucarpia Section Biometrics in Plant Breeding, The Netherlands, pp.195-204 (1994), herein incorporated by reference in its entirety), thereby improving the precision and efficiency of QTL mapping (Zeng, Genetics 136:1457-1468 (1994)). These models can be extended to multi-environment experiments to analyze genotype-environment interactions (Jansen et al., Theo. Appl. Genet. 91:33-37 (1995), the entirety of which is herein incorporated by reference).

[0151] Selection of an appropriate mapping population is important to map construction. The choice of an appropriate mapping population depends on the type of marker systems employed (Tanksley et al., Molecular mapping plant chromosomes. Chromosome structure and function: Impact of new concepts, Gustafson and Appels (eds.), Plenum Press, New York, pp 157-173 (1988), herein incorporated by reference in its entirety). Consideration must be given to the source of parents (adapted vs. exotic) used in the mapping population. Chromosome pairing and recombination rates can be severely disturbed (suppressed) in wide crosses (adapted x exotic) and generally yield greatly reduced linkage distances. Wide crosses will usually provide segregating populations with a relatively large array of polymorphisms when compared to progeny in a narrow cross (adapted x adapted).

[0152] An F₂ population is the first generation of selfing after the hybrid seed is produced. Usually a single F₁ plant is selfed to generate a population segregating for all the genes in Mendelian (1:2:1) fashion. Maximum genetic information is obtained from a completely classified F₂ population using a codominant marker system (Mather, Measurement of Linkage in Heredity, Methuen and Co., (1938), the entirety of which is herein incorporated by reference). In the case of dominant markers, progeny tests (e.g. F₃, BCF₂) are required to identify the heterozygotes, thus making it equivalent to a completely classified F₂ population. However, this procedure is often prohibitive because of the cost and time involved in progeny testing. Progeny testing of F₂ individuals is often used in map construction where phenotypes do not consistently reflect genotype (e.g. disease resistance) or where trait expression is controlled by a QTL. Segregation data from progeny test populations (e.g. F₃ or BCF₂) can be used in map construction. Marker-assisted selection can then be applied to cross progeny based on marker-trait map associations (F₂, F₃), where linkage groups have not been completely disassociated by recombination events (i.e., maximum disequillibrium).

[0153] Recombinant inbred lines (RIL) (genetically related lines; usually>F₅, developed from continuously selfing F₂ lines towards homozygosity) can be used as a mapping population. Information obtained from dominant markers can be maximized by using RIL because all loci are homozygous or nearly so. Under conditions of tight linkage (i.e., about <10% recombination), dominant and co-dominant markers evaluated in RIL populations provide more information per individual than either marker type in backcross populations (Reiter et al., Proc. Natl. Acad. Sci. (U.S.A.) 89:1477-1481 (1992), the entirety of which is herein incorporated by reference). However, as the distance between markers becomes larger (i.e., loci become more independent), the information in RIL populations decreases dramatically when compared to codominant markers.

[0154] Backcross populations (e.g., generated from a cross between a successful variety (recurrent parent) and another variety (donor parent) carrying a trait not present in the former) can be utilized as a mapping population. A series of backcrosses to the recurrent parent can be made to recover most of its desirable traits. Thus a population is created consisting of individuals nearly like the recurrent parent but each individual carries varying amounts or mosaic of genomic regions from the donor parent. Backcross populations can be useful for mapping dominant markers if all loci in the recurrent parent are homozygous and the donor and recurrent parent have contrasting polymorphic marker alleles (Reiter et al., Proc. Natl. Acad. Sci. (U.S.A.) 89:1477-1481 (1992)). Information obtained from backcross populations using either codominant or dominant markers is less than that obtained from F₂ populations because one, rather than two, recombinant gametes are sampled per plant. Backcross populations, however, are more informative (at low marker saturation) when compared to RILs as the distance between linked loci increases in RIL populations (i.e. about 15% recombination). Increased recombination can be beneficial for resolution of tight linkages, but may be undesirable in the construction of maps with low marker saturation.

[0155] Near-isogenic lines (NIL) created by many backcrosses to produce an array of individuals that are nearly identical in genetic composition except for the trait or genomic region under interrogation can be used as a mapping population. In mapping with NILs, only a portion of the polymorphic loci are expected to map to a selected region.

[0156] Bulk segregant analysis (BSA) is a method developed for the rapid identification of linkage between markers and traits of interest (Michelmore et al., Proc. Natl. Acad. Sci. (U.S.A.) 88:9828-9832 (1991), the entirety of which is herein incorporated by reference). In BSA, two bulked DNA samples are drawn from a segregating population originating from a single cross. These bulks contain individuals that are identical for a particular trait (resistant or susceptible to particular disease) or genomic region but arbitrary at unlinked regions (i.e. heterozygous). Regions unlinked to the target region will not differ between the bulked samples of many individuals in BSA.

[0157] It is understood that one or more of the nucleic acid molecules of the present invention may be used as molecular markers. It is also understood that one or more of the protein molecules of the present invention may be used as molecular markers.

[0158] In accordance with this aspect of the present invention, a sample nucleic acid is obtained from plant cells or tissues. Any source of nucleic acid may be used. Preferably, the nucleic acid is genomic DNA. The nucleic acid is subjected to restriction endonuclease digestion. For example, one or more EST nucleic acid molecule or fragment thereof can be used as a probe in accordance with the above-described polymorphic methods. The polymorphism obtained in this approach can then be cloned to identify the mutation at the coding region which alters the protein's structure or regulatory region of the gene which affects its expression level.

[0159] In one aspect of the present invention, an evaluation can be conducted to determine whether a particular mRNA molecule is present. One or more of the nucleic acid molecules of the present invention, preferably one or more of the EST nucleic acid molecules of the present invention are utilized to detect the presence or quantity of the mRNA species. Such molecules are then incubated with cell or tissue extracts of a plant under conditions sufficient to permit nucleic acid hybridization. The detection of double-stranded probe-mRNA hybrid molecules is indicative of the presence of the mRNA; the amount of such hybrid formed is proportional to the amount of mRNA. Thus, such probes may be used to ascertain the level and extent of the mRNA production in a plant's cells or tissues. Such nucleic acid hybridization may be conducted under quantitative conditions (thereby providing a numerical value of the amount of the mRNA present). Alternatively, the assay may be conducted as a qualitative assay that indicates either that the mRNA is present, or that its level exceeds a user set, predefined value.

[0160] A principle of in situ hybridization is that a labeled, single-stranded nucleic acid probe will hybridize to a complementary strand of cellular DNA or RNA and, under the appropriate conditions, these molecules will form a stable hybrid. When nucleic acid hybridization is combined with histological techniques, specific DNA or RNA sequences can be identified within a single cell. An advantage of in situ hybridization over more conventional techniques for the detection of nucleic acids is that it allows an investigator to determine the precise spatial population (Angerer et al., Dev. Biol. 101: 477-484 (1984); Angerer et al., Dev. Biol. 112: 157-166 (1985); Dixon et al., EMBO J. 10: 1317-1324(1991), all of which are herein incorporated by reference in their entirety). In situ hybridization may be used to measure the steady-state level of RNA accumulation. It is a sensitive technique and RNA sequences present in as few as 5-10 copies per cell can be detected (Hardin et al., J. Mol Biol. 202: 417-431.(1989), herein incorporated by reference in its entirety). A number of protocols have been devised for in situ hybridization, each with tissue preparation, hybridization, and washing conditions (Meyerowitz, Plant Mol. Biol. Rep. 5: 242-250 (1987); Cox and Goldberg, In: Plant Molecular Biology: A Practical Approach (ed. C. H. Shaw), pp. 1-35. IRL Press, Oxford (1988); Raikhel et al., In situ RNA hybridization in plant tissues. In Plant Molecular Biology Manual, vol. B9: 1-32. Kluwer Academic Publisher, Dordrecht, Belgium (1989), all of which are herein incorporated by reference in their entirety).

[0161] In situ hybridization also allows for the localization of proteins within a tissue or cell (Wilkinson, In Situ Hybridization, Oxford University Press, Oxford (1992); Langdale, In Situ Hybridization 165-179 In: The Maize Handbook, eds. Freeling and Walbot, Springer-Verlag, New York (1994), both of which are herein incorporated by reference in their entirety). It is understood that one or more of the molecules of the present invention, preferably one or more of the EST nucleic acid molecules of the present invention or one or more of the antibodies of the present invention may be utilized to detect the level or pattern of a protein or fragment thereof by in situ hybridization.

[0162] Fluorescent in situ hybridization also enables the localization of a particular DNA sequence along a chromosome which is useful, among other uses, for gene mapping, following chromosomes in hybrid lines or detecting chromosomes with translocations, transversions or deletions. In situ hybridization has been used to identify chromosomes in several plant species (Griffor et al., Plant Mol. Biol. 17: 101-109 (1991); Gustafson et al., Proc. Nat'l. Acad. Sci. (U.S.A.). 87: 1899-1902 (1990); Mukai and Gill, Genome 34: 448-452. (1991); Schwarzacher and Heslop-Harrison, Genome 34: 317-323 (1991); Wang et al., Jpn. J. Genet. 66: 313-316 (1991); Parra and Windle, Nature Genetics, 5: 17-21 (1993), all of which are herein incorporated by reference in their entirety). It is understood that the nucleic acid molecules of the present invention may be used as probes or markers to localize sequences along a chromosome.

[0163] It is also understood that one or more of the molecules of the present invention, preferably one or more of the EST nucleic acid molecules of the present invention or one or more of the antibodies of the present invention may be utilized to detect the expression level or pattern of a protein or mRNA thereof by in situ hybridization.

[0164] Another method to localize the expression of a molecule is tissue printing. Tissue printing provides a way to screen, at the same time on the same membrane many tissue sections from different plants or different developmental stages. Tissue-printing procedures utilize films designed to immobilize proteins and nucleic acids. In essence, a freshly cut section of an organ is pressed gently onto nitrocellulose paper, nylon membrane or polyvinylidene difluoride membrane. Such membranes are commercially available (e.g. Millipore, Bedford, Mass.). The contents of the cut cell transfer onto the membrane, and the molecules are immobilized to the membrane. The immobilized molecules form a latent print that can be visualized with appropriate probes. When a plant tissue print is made on nitrocellulose paper, the cell walls leave a physical print that makes the anatomy visible without further treatment (Varner and Taylor, Plant Physiol. 91: 31-33 (1989), the entirety of which is herein incorporated by reference).

[0165] Tissue printing on substrate films is described by Daoust, Exp. Cell Res. 12: 203-211 (1957), herein incorporated by reference in its entirety, who detected amylase, protease, ribonuclease, and deoxyribonuclease in animal tissues using starch, gelatin, and agar films. These techniques can be applied to plant tissues (Yomo and Taylor, Planta 112:35-43 (1973); Harris and Chrispeels, Plant Physiol. 56: 292-299 (1975), both of which are herein incorporated by reference in their entirety). Advances in membrane technology have increased the range of applications of Daoust's tissue-printing techniques allowing (Cassab and Varner, J. Cell. Biol. 105: 2581-2588 (1987), the entirety of which is herein incorporated by reference; the histochemical localization of various plant enzymes and deoxyribonuclease on nitrocellulose paper and nylon (Spruce et al., Phytochemistry, 26: 2901-2903 (1987); Barres et al. Neuron 5: 527-544 (1990); Reid and Pont-Lezica, Tissue Printing: Tools for the Study of Anatomy, Histochemistry, and Gene Expression, Academic Press, New York, N.Y. (1992); Reid et al. Plant Physiol. 93: 160-165 (1990); Ye et al. Plant J. 1: 175-183 (1991), all of which are herein incorporated by reference in their entirety).

[0166] It is understood that one or more of the molecules of the present invention, preferably one or more of the EST nucleic acid molecules of the present invention or one or more of the antibodies of the present invention may be utilized to detect the presence or quantity of a protein by tissue printing.

[0167] Further, it is also understood that any of the nucleic acid molecules of the present invention may be used as marker nucleic acids and or probes in connection with methods that require probes or marker nucleic acids. As used herein, a probe is an agent that is utilized to determine an attribute or feature (e.g. presence or absence, location, correlation, etc.) or a molecule, cell, tissue or plant. As used herein, a marker nucleic acid is a nucleic acid molecule that is utilized to determine an attribute or feature (e.g., presence or absence, location, correlation, etc.) or a molecule, cell, tissue or plant.

[0168] A microarray-based method for high-throughput monitoring of gene expression may be utilized to measure expression response Schena et al., Science 270:467-470 (1995); http://cmgm.stanford.edu/pbrown/array.html; Shalon, Ph.D. Thesis, Stanford University (1996). This approach is based on using arrays of DNA targets (e.g. cDNA inserts, colonies, or polymerase chain reaction products) for hybridization to a “complex probe” prepared with RNA extracted from a given cell line or tissue. The probe may be produced by reverse transcription of mRNA or total RNA and labeled with radioactive or fluorescent labeling. The probe is complex in that it contains many different sequences in various amounts, corresponding to the numbers of copies of the original mRNA species extracted from the sample.

[0169] The initial RNA source will typically be derived from a physiological source. The physiological source may be derived from a variety of eukaryotic sources, with physiological sources of interest including sources derived from single celled organisms such as yeast and multicellular organisms, including plants and animals, particularly plants, where the physiological sources from multicellular organisms may be derived from particular organs or tissues of the multicellular organism, or from isolated cells derived therefrom. The physiological sources may be derived from multicellular organisms at different developmental stages (e.g., 10-day-old seedlings), grown under different environmental conditions (e.g., drought-stressed plants) or treated with chemicals.

[0170] In obtaining the sample of RNAs to be analyzed from the physiological source from which it is derived, the physiological source may be subjected to a number of different processing steps, where such processing steps might include tissue homogenation, cell isolation and cytoplasmic extraction, nucleic acid extraction and the like, where such processing steps are known to the those of skill in the art. Methods of isolating RNA from cells, tissues, organs or whole organisms are known to those of skill in the art and are described in Maniatis et al., Molecular Cloning: A Laboratory Manual (Cold Spring Harbor Press) (1989).

[0171] The DNA may be placed on nylon or glass “microarrays” regularly arranged with a spot spacing of 1 mm or less. Expression levels can be measured for hundreds or thousands of genes, by using less than 2 micrograms of polyA+ RNA and determining the relative mRNA abundances down to one in ten thousand or less (Granjeaud et. al., BioEssays 21:781-790 (1999)).

[0172] As disclosed in U.S. Pat. No. 5,445,934 arrays with nucleic acid molecules can comprise a substrate with a surface comprising 10³ or more groups of oligonucleotides with different, known sequences covalently attached to the surface in discrete known regions, e.g. 10⁴ or 10⁵ or 10⁶ or more different groups of known sequences in discrete known regions. In preferred arrays 10³ or more groups of oligonucleotides accupy a total area of less than 1 cm². In preferred embodiments the groups of oligonucleotides are at least 50% pure within the discrete known regions.

[0173] In addition to arrays of cDNA clones or inserts, arrays of oligonucleotides are also used to study differential gene expression. In an oligonucleotide array, the genes of interest are represented by a series of approximately 20 nucleotide oligomers that are unique to each gene. Labeled mRNA is prepared and hybridization signals are detected from specific sets of oligos that represent different genes supplemented by a set of control oligonucleotides. Potential advantages of the oligonucleotide array include enhanced specificity and sensitivity through the parallel analysis of “perfect match” oligos and “mismatch” oligos for each gene. The hybridization conditions can be adjusted to distinguish a perfect heteroduplex from a single base mismatch, thus allowing subtraction of nonspecific hybridization signals from specific hybridization signals. A disadvantage of oligonucleotide arrays relative to cDNA arrays is the limitation of the technology to genes of known sequence (Granjeaud et. al., BioEssays 21:781-790 (1991); Carulli et al., Journal of Cellular Biochemistry Supplements 30/31:286-296 (1998)).

[0174] These techniques have been successfully used to characterize patterns of gene expression associated with, for example, various important physiological changes in yeast, including the mitotic cell cycle, the heat shock response, and comparison between mating types. Once a set of comparable expression profiles is obtained, e.g. for cells at different time points or at different cellular states, a clustering algorithm generally is used to group sets of genes which share similar expression patterns. The clusters obtained can then be analyzed in the light of available functional annotations, often leading to associations of poorly characterized genes with genes whose function and regulation are better understood.

[0175] Regulatory networks that control gene expression can be characterized using microarray technology (DeRisi et al., Science 278: 680-686 (1997); Winzler et al. Science 28: 1194-1197 (1998); Cho et al. Mol Cell 2: 65-73 (1998); Spellman et al. Mol Biol Cell 95: 14863-14868 (1998). For example, it is has been reported that both cDNA and oligonucleotide arrays have been used to monitor gene expression in synchronized cell cultures. Analysis of the corresponding temporal patterns of gene expression resulted in the identification of over 400 cell cycle-regulated genes. In order to identify possible common regulatory mechanisms accounting for co-expression, consensus motifs in putative regulatory sequences upstream of the corresponding ORFs were examined. This resulted in the identification of several new potential binding sites for known factors or complexes involved in the coordinated transcription of genes during specific phases of the cell cycle (Thieffry, D. BioEssays 21: 895-899 (1999)).

[0176] The microarray approach may be used with polypeptide targets (U.S. Pat. No. 5,445,934; U.S. Pat. No: 5,143,854; U.S. Pat. No. 5,079,600; U.S. Pat. No. 4,923,901) synthesized on a substrate (microarray) and these polypeptides can be screened with either (Fodor et al., Science 251:767-773 (1991)). It is understood that one or more of the nucleic acid molecules or protein or fragments thereof of the invention may be utilized in a microarray-based method.

[0177] In a preferred embodiment of the present invention microarrays may be prepared that comprise nucleic acid molecules where preferably at least 10%, preferably at least 25%, more preferably at least 50% and even more preferably at least 75%, 80%, 85%, 90% or 95% of the nucleic acid molecules located on that array are selected from the group of nucleic acid molecules that specifically hybridize to one or more nucleic acid molecule having a nucleic acid sequence selected from the group of SEQ ID NO: 1 through SEQ ID NO: 4930 or complement thereof or fragments of either.

[0178] A particular preferred microarray embodiment of the present invention is a microarray comprising nucleic acid molecules encoding genes or fragments thereof that are homologues of known genes or nucleic acid molecules that comprise genes or fragment thereof that elicit only limited or no matches to known genes. A further preferred microarray embodiment of the present invention is a microarray comprising nucleic acid molecules having genes or fragments thereof that are homologues of known genes and nucleic acid molecules that comprise genes or fragment thereof that elicit only limited or no matches to known genes. Site-directed mutagenesis may be utilized to modify nucleic acid sequences, particularly as it is a technique that allows one or more of the amino acids encoded by a nucleic acid molecule to be altered (e.g. a threonine to be replaced by a methionine). Three basic methods for site-directed mutagenesis are often employed. These are cassette mutagenesis (Wells et al., Gene 34:315-23 (1985), the entirety of which is herein incorporated by reference), primer extension (Gilliam et al., Gene 12:129-137 (1980), the entirety of which is herein incorporated by reference); Zoller and Smith, Methods Enzymol. 100:468-500 (1983), the entirety of which is herein incorporated by reference; and Dalbadie-McFarland et al., Proc. Natl. Acad. Sci. (U.S.A.) 79:6409-6413 (1982), the entirety of which is herein incorporated by reference) and methods based upon PCR (Scharf et al., Science 233:1076-1078 (1986), the entirety of which is herein incorporated by reference; Higuchi et al., Nucleic Acids Res. 16:7351-7367 (1988), the entirety of which is herein incorporated by reference). Site-directed mutagenesis approaches are also described in European Patent 0 385 962, the entirety of which is herein incorporated by reference, European Patent 0 359 472, the entirety of which is herein incorporated by reference, and PCT Patent Application WO 93/07278, the entirety of which is herein incorporated by reference.

[0179] Site-directed mutagenesis strategies have been applied to plants for both in vitro as well as in vivo site-directed mutagenesis (Lanz et al., J. Biol. Chem. 266:9971-6 (1991); Kovgan and Zhdanov, Biotekhnologiya 5:148-154; No. 207160n, Chemical Abstracts 110:225 (1989); Ge et al., Proc. Natl. Acad. Sci. (U.S.A.) 86:4037-4041 (1989); Zhu et al., J. Biol. Chem. 271:18494-18498 (1996); Chu et al., Biochemistry 33:6150-6157 (1994); Small et al., EMBO J. 11:1291-1296 (1992); Cho et al., Mol. Biotechnol. 8:13-16 (1997); Kita et al., J. Biol. Chem. 271:26529-26535 (1996); Jin et al., Mol. Microbiol. 7:555-562 (1993); Hatfield and Vierstra, J. Biol. Chem. 267:14799-14803 (1992); Zhao et al., Biochemistry 31:5093-5099 (1992), all of which are herein incorporated by reference in their entirety).

[0180] Any of the nucleic acid molecules of the present invention may either be modified by site-directed mutagenesis or used as, for example, nucleic acid molecules that are used to target other nucleic acid molecules for modification. It is understood that mutants with more than one altered nucleotide can be constructed using techniques that practitioners skilled in the art are familiar with such as isolating restriction fragments and ligating such fragments into an expression vector (see, for example, Sambrook et al., Molecular Cloning: A Laboratory Manual, Cold Spring Harbor Press (1989)).

[0181] Sequence-specific DNA-binding proteins play a role in the regulation of transcription. The isolation of recombinant cDNAs encoding these proteins facilitates the biochemical analysis of their structural and functional properties. Genes encoding such DNA-binding proteins have been isolated using classical genetics (Vollbrecht et al., Nature 350: 241-243 (1991), herein incorporated by reference in its entirety) and molecular biochemical approaches, including the screening of recombinant cDNA libraries with antibodies (Landschulz et al., Genes Dev. 2: 786-800 (1988), herein incorporated by reference in its entirety) or DNA probes (Bodner et al., Cell 55: 505-518 (1988), herein incorporated by reference in its entirety). In addition, an in situ screening procedure has been used and has facilitated the isolation of sequence-specific DNA-binding proteins from various plant species (Gilmartin et al., Plant Cell 4: 839-849 (1992); Schindler et al., EMBO J. 11: 1261-1273 (1992) both of which are herein incorporated by reference in their entirety). An in situ screening protocol does not require the purification of the protein of interest (Vinson et al., Genes Dev. 2: 801-806 (1988); Singh et al., Cell 52: 415-423 (1988), both of which are herein incorporated by reference in their entirety).

[0182] Steps may be employed to characterize DNA-protein interactions. The first is to identify promoter fragments that interact with DNA-binding proteins, to titrate binding activity, to determine the specificity of binding, and to determine whether a given DNA-binding activity can interact with related DNA sequences (Sambrook et al., Molecular Cloning: A Laboratory Manual, 2^{nd} edition. Cold Spring Harbor Laboratory Press, Cold Spring Harbor, N.Y. (1989). Electrophoretic mobility-shift assay is a widely used assay. The assay provides a simple, rapid, and sensitive method for detecting DNA-binding proteins based on the observation that the mobility of a DNA fragment through a nondenaturing, low-ionic strength polyacrylamide gel is retarded upon association with a DNA-binding protein (Fried and Crother, Nucleic Acids Res. 9: 6505-6525 (1981), herein incorporated by reference in its entirety). When one or more specific binding activities have been identified, the exact sequence of the DNA bound by the protein may be determined. Several procedures for characterizing protein/DNA-binding sites are used, including methylation and ethylation interference assays (Maxam and Gilbert, Methods Enzymol. 65: 499-560 (1980); Wissman and Hillen, Methods Enzymol. 208: 365-379 (1991), both of which are herein incorporated by reference in their entirety) and footprinting techniques employing DNase I (Galas and Schmitz, Nucleic Acids Res. 5: 3157-3170 (1978), herein incorporated by reference in its entirety), 1,10-phenanthroline-copper ion methods (Sigman et al., Methods Enzymol. 208: 365-379 (1991), herein incorporated by reference in its entirety) or hydroxyl radical methods (Dixon et al., Methods Enzymol. 208: 380-413 (1991), herein incorporated by reference in its entirety). It is understood that one or more of the nucleic acid molecules of the present invention, preferably one or more of the EST nucleic acid molecules of the present invention may be utilized to identify a protein or fragment thereof that specifically binds to a nucleic acid molecule of the present invention. It is also understood that one or more of the protein molecules or fragments thereof of the present invention may be utilized to identify a nucleic acid molecule that specifically binds to it.

[0183] The two-hybrid system is based on the fact that many cellular functions are carried out by proteins that interact (physically) with one another. Two-hybrid systems have been used to probe the function of new proteins (Chien et al., Proc. Natl. Acad. Sci. (U.S.A.) 88: 9578-9582 (1991); Durfee et al., Genes Dev. 7: 555-569 (1993); Choi et al., Cell 78: 499-512 (1994); Kranz et al., Genes Dev. 8: 313-327 (1994), all of which are herein incorporated by reference in their entirety).

[0184] Interaction mating techniques have facilitated a number of two-hybrid studies of protein-protein interaction. Interaction mating has been used to examine interactions between small sets of tens of proteins (Finley and Brent, Proc. Natl. Acad. Sci. (U.S.A.) 91: 12098-12984 (1994), herein incorporated by reference in its entirety), larger sets of hundreds of proteins, (Bendixen et al., Nuc. Acids Res. 22: 1778-1779 (1994), herein incorporated by reference in its entirety) and to comprehensively map proteins encoded by a small genome (Bartel et al., Nature Genetics 12: 72-77 (1996), herein incorporated by reference in its entirety). This technique utilizes proteins fused to the DNA-binding domain and proteins fused to the activation domain. They are expressed in two different haploid yeast strains of opposite mating type, and the strains are mated to determine if the two proteins interact. Mating occurs when haploid yeast strains come into contact and result in the fusion of the two haploids into a diploid yeast strain. An interaction can be determined by the activation of a two-hybrid reporter gene in the diploid strain. The primary advantage of this technique is that it reduces the number of yeast transformations needed to test individual interactions. It is understood that the protein-protein interactions of protein or fragments thereof of the present invention may be investigated using the two-hybrid system and that any of the nucleic acid molecules of the present invention that encode such proteins or fragments thereof may be used to transform yeast in the two-hybrid system.

[0185] Synechocystis 6803 is a photosynthetic Cyanobacterium capable of oxygenic photosynthesis as well as heterotrophic growth in the absence of light. The entire genome has been sequenced, and it is reported to have a circular genome size of 3.57 Mbp containing 3168 potential open reading frames. Open reading frames (ORFs) were identified based upon their homology to other reported ORFs and by using ORF identification computer programs. Sixteen hundred potential ORFs were assigned based on their homology to previously identified ORFs. Of these 1600 ORFs, 145 were identical to reported ORFs (Kaneko et al., DNA Research 3:109-36 (1996), herein incorporated by reference in its entirety).

[0186] Several prokaryote promoters have been used in Synechocystis to express heterologous genes including the tac, lac, and lambda phage promoters (Bryant (ed.), The Molecular Biology of Cyanobacteria, Kluwer Academic Publishers, (1994); Ferino and Chauvat, Gene 84:257-266 (1989), both of which are herein incorporated by reference in their entirety). Several bacterial origins of replication such as RSF 1010 and ACYC are reported to replicate in Synechocystis (Mermet-Bouvier and Chauvat, Current Microbiology 28:145-148 (1994); Kuhlemeier et al., Mol. Gen. Genet. 184:249-254 (1981), both of which are herein incorporated by reference in their entirety).

[0187] Synechocystis has been used to study gene regulation by gene replacement through homologous recombination or by gene disruption using antibiotic resistance markers (Pakrasi et al., EMBO 7:325-332 (1988), herein incorporated by reference in its entirety). In such gene regulation studies, double reciprocal homologous regions of the host genome flanking the gene of interest recombine to stably integrate the gene of interest into the genome. The gene of interest can be expressed once that gene has been stably integrated into the genome. Biochemical analysis can be performed to study the effect of the replaced or deleted gene.

[0188] It is understood that the agents of the present invention may be employed in a Synechocystis system.

[0189] Exogenous genetic material may be transferred into a plant cell and the plant cell regenerated into a whole, fertile or sterile plant. Exogenous genetic material is any genetic material, whether naturally occurring or otherwise, from any source that is capable of being inserted into any organism. Such genetic material may be transferred into either monocotyledons and dicotyledons including but not limited to the crops, maize and soybean (See specifically, Chistou, Particle Bombardment for Genetic Engineering of Plants, pp 63-69 (maize), pp50-60 (soybean), Biotechnology Intelligence Unit. Academic Press, San Diego, Calif. (1996), the entirety of which is herein incorporated by reference and generally Chistou, Particle Bombardment for Genetic Engineering of Plants, Biotechnology Intelligence Unit. Academic Press, San Diego, Calif. (1996), the entirety of which is herein incorporated by reference).

[0190] Transfer of a nucleic acid that encodes for a protein can result in overexpression of that protein in a transformed cell or transgenic plant. One or more of the proteins or fragments thereof encoded by nucleic acid molecules of the present invention may be overexpressed in a transformed cell or transformed plant. Such overexpression may be the result of transient or stable transfer of the exogenous material.

[0191] Exogenous genetic material may be transferred into a plant cell by the use of a DNA vector or construct designed for such a purpose. Design of such a vector is generally within the skill of the art (See, Plant Molecular Biology: A Laboratory Manual eds. Clark, Springer, N.Y. (1997), the entirety of which is herein incorporated by reference).

[0192] A construct or vector may include a plant promoter to express the protein or protein fragment of choice. A number of promoters which are active in plant cells have been described in the literature. These include the nopaline synthase (NOS) promoter (Ebert et al., Proc. Natl. Acad. Sci. (U.S.A.) 84:5745-5749 (1987), the entirety of which is herein incorporated by reference), the octopine synthase (OCS) promoter (which are carried on tumor-inducing plasmids of Agrobacterium tumefaciens), the caulimovirus promoters such as the cauliflower mosaic virus (CaMV) 19S promoter (Lawton et al., Plant Mol. Biol. 9:315-324 (1987), the entirety of which is herein incorporated by reference) and the CAMV 35S promoter (Odell et al., Nature 313:810-812 (1985), the entirety of which is herein incorporated by reference), the figwort mosaic virus 35S-promoter, the light-inducible promoter from the small subunit of ribulose-1,5-bis-phosphate carboxylase (ssRUBISCO), the Adh promoter (Walker et al., Proc. Natl. Acad. Sci. (U.S.A.) 84:6624-6628 (1987), the entirety of which is herein incorporated by reference), the sucrose synthase promoter (Yang et al., Proc. Natl. Acad. Sci. (U.S.A.) 87:4144-4148 (1990), the entirety of which is herein incorporated by reference), the R gene complex promoter (Chandler et al., The Plant Cell 1:1175-1183 (1989), the entirety of which is herein incorporated by reference), and the chlorophyll a/b binding protein gene promoter, etc. These promoters have been used to create DNA constructs which have been expressed in plants; see, e.g., PCT publication WO 84/02913, herein incorporated by reference in its entirety.

[0193] Promoters which are known or are found to cause transcription of DNA in plant cells can be used in the present invention. Such promoters may be obtained from a variety of sources such as plants and plant viruses. It is preferred that the particular promoter selected should be capable of causing sufficient expression to result in the production of an effective amount of a protein to cause the desired phenotype. In addition to promoters which are known to cause transcription of DNA in plant cells, other promoters may be identified for use in the current invention by screening a plant cDNA library for genes which are selectively or preferably expressed in the target tissues or cells.

[0194] For the purpose of expression in source tissues of the plant, such as the leaf, seed, root or stem, it is preferred that the promoters utilized in the present invention have relatively high expression in these specific tissues. For this purpose, one may choose from a number of promoters for genes with tissue- or cell-specific or -enhanced expression. Examples of such promoters reported in the literature include the chloroplast glutamine synthetase GS2 promoter from pea (Edwards et al., Proc. Natl. Acad. Sci. (U.S.A.) 87:3459-3463 (1990), herein incorporated by reference in its entirety), the chloroplast fructose-1,6-biphosphatase (FBPase) promoter from wheat (Lloyd et al., Mol. Gen. Genet. 225:209-216 (1991), herein incorporated by reference in its entirety), the nuclear photosynthetic ST-LS1 promoter from potato (Stockhaus et al., EMBO J. 8:2445-2451 (1989), herein incorporated by reference in its entirety), the phenylalanine ammonia-lyase (PAL) promoter and the chalcone synthase (CHS) promoter from Arabidopsis thaliana. Also reported to be active in photosynthetically active tissues are the ribulose-1,5-bisphosphate carboxylase (RbcS) promoter from eastern larch (Larix laricina), the promoter for the cab gene, cab6, from pine (Yamamoto et al., Plant Cell Physiol. 35:773-778 (1994), herein incorporated by reference in its entirety), the promoter for the Cab-1 gene from wheat (Fejes et al., Plant Mol. Biol. 15:921-932 (1990), herein incorporated by reference in its entirety), the promoter for the CAB-1 gene from spinach (Lubberstedt et al., Plant Physiol. 104:997-1006 (1994), herein incorporated by reference in its entirety), the promoter for the cab1R gene from rice (Luan et al., Plant Cell. 4:971-981 (1992), the entirety of which is herein incorporated by reference), the pyruvate, orthophosphate dikinase (PPDK) promoter from maize (Matsuoka et al., Proc. Natl. Acad. Sci. (U.S.A.) 90: 9586-9590 (1993), herein incorporated by reference in its entirety), the promoter for the tobacco Lhcb1*2 gene (Cerdan et al., Plant Mol. Biol. 33: 245-255. (1997), herein incorporated by reference in its entirety), the Arabidopsis thaliana SUC2 sucrose-H+ symporter promoter (Truernit et al., Planta. 196: 564-570 (1995), herein incorporated by reference in its entirety), and the promoter for the thylacoid membrane proteins from spinach (psaD, psaF, psaE, PC, FNR, atpC, atpD, cab, rbcS). Other promoters for the chlorophyl a/b-binding proteins may also be utilized in the present invention, such as the promoters for LhcB gene and PsbP gene from white mustard (Sinapis alba; Kretsch et al., Plant Mol. Biol. 28: 219-229 (1995), the entirety of which is herein incorporated by reference).

[0195] For the purpose of expression in sink tissues of the plant, such as the tuber of the potato plant, the fruit of tomato, or the seed of maize, wheat, rice, and barley, it is preferred that the promoters utilized in the present invention have relatively high expression in these specific tissues. A number of promoters for genes with tuber-specific or -enhanced expression are known, including the class I patatin promoter (Bevan et al., EMBO J. 8: 1899-1906 (1986); Jefferson et al., Plant Mol. Biol. 14: 995-1006 (1990), both of which are herein incorporated by reference in its entirety), the promoter for the potato tuber ADPGPP genes, both the large and small subunits, the sucrose synthase promoter (Salanoubat and Belliard, Gene. 60: 47-56 (1987), Salanoubat and Belliard, Gene. 84: 181-185 (1989), both of which are incorporated by reference in their entirety), the promoter for the major tuber proteins including the 22 kd protein complexes and proteinase inhibitors (Hannapel, Plant Physiol. 101: 703-704 (1993), herein incorporated by reference in its entirety), the promoter for the granule bound starch synthase gene (GBSS) (Visser et al., Plant Mol. Biol. 17: 691-699 (1991), herein incorporated by reference in its entirety), and other class I and II patatins promoters (Koster-Topfer et al., Mol Gen Genet. 219: 390-396 (1989); Mignery et al., Gene. 62: 27-44 (1988), both of which are herein incorporated by reference in their entirety).

[0196] Other promoters can also be used to express a fructose 1,6 bisphosphate aldolase gene in specific tissues, such as seeds or fruits. The promoter for β-conglycinin (Chen et al., Dev. Genet. 10: 112-122 (1989), herein incorporated by reference in its entirety) or other seed-specific promoters such as the napin and phaseolin promoters, can be used. The zeins are a group of storage proteins found in maize endosperm. Genomic clones for zein genes have been isolated (Pedersen et al., Cell 29: 1015-1026 (1982), herein incorporated by reference in its entierty), and the promoters from these clones, including the 15 kD, 16 kD, 19 kD, 22 kD, 27 kD, and gamma genes, could also be used. Other promoters known to function, for example, in maize, include the promoters for the following genes: waxy, Brittle, Shrunken 2, Branching enzymes I and II, starch synthases, debranching enzymes, oleosins, glutelins, and sucrose synthases. A particularly preferred promoter for maize endosperm expression is the promoter for the glutelin gene from rice, more particularly the Osgt-1 promoter (Zheng et al., Mol. Cell Biol. 13: 5829-5842 (1993), herein incorporated by reference in its entirety). Examples of promoters suitable for expression in wheat include those promoters for the ADPglucose pyrophosphorylase (ADPGPP) subunits, the granule bound and other starch synthases, the branching and debranching enzymes, the embryogenesis-abundant proteins, the gliadins, and the glutenins. Examples of such promoters in rice include those promoters for the ADPGPP subunits, the granule bound and other starch synthases, the branching enzymes, the debranching enzymes, sucrose synthases, and the glutelins. A particularly preferred promoter is the promoter for rice glutelin, Osgt-1. Examples of such promoters for barley include those for the ADPGPP subunits, the granule bound and other starch synthases, the branching enzymes, the debranching enzymes, sucrose synthases, the hordeins, the embryo globulins, and the aleurone specific proteins.

[0197] Root specific promoters may also be used. An example of such a promoter is the promoter for the acid chitinase gene (Samac et al., Plant Mol. Biol. 25: 587-596 (1994), the entirety of which is herein incorporated by reference). Expression in root tissue could also be accomplished by utilizing the root specific subdomains of the CaMV35S promoter that have been identified (Lam et al., Proc. Natl. Acad. Sci. (U.S.A.) 86:7890-7894 (1989), herein incorporated by reference in its entirety). Other root cell specific promoters include those reported by Conkling et al. (Conkling et al., Plant Physiol. 93:1203-1211 (1990), the entirety of which is herein incorporated by reference).

[0198] Additional promoters that may be utilized are described, for example, in U.S. Pat. Nos. 5,378,619, 5,391,725, 5,428,147, 5,447,858, 5,608,144, 5,608,144, 5,614,399, 5,633,441, 5,633,435, and 4,633,436, all of which are herein incorporated in their entirety. In addition, a tissue specific enhancer may be used (Fromm et al., The Plant Cell 1:977-984 (1989), the entirety of which is herein incorporated by reference).

[0199] Constructs or vectors may also include, with the coding region of interest, a nucleic acid sequence that acts, in whole or in part, to terminate transcription of that region. For example, such sequences have been isolated including the Tr7 3′ sequence and the nos 3′ sequence (Ingelbrecht et al., The Plant Cell 1:671-680 (1989), the entirety of which is herein incorporated by reference; Bevan et al., Nucleic Acids Res. 11:369-385 (1983), the entirety of which is herein incorporated by reference), or the like.

[0200] A vector or construct may also include regulatory elements. Examples of such include the Adh intron 1 (Callis et al., Genes and Develop. 1:1183-1200 (1987), the entirety of which is herein incorporated by reference), the sucrose synthase intron (Vasil et al., Plant Physiol. 91:1575-1579 (1989), the entirety of which is herein incorporated by reference) and the TMV omega element (Gallie et al., The Plant Cell 1:301-311 (1989), the entirety of which is herein incorporated by reference). These and other regulatory elements may be included when appropriate.

[0201] A vector or construct may also include a selectable marker. Selectable markers may also be used to select for plants or plant cells that contain the exogenous genetic material. Examples of such include, but are not limited to, a neo gene (Potrykus et al., Mol. Gen. Genet. 199:183-188 (1985), the entirety of which is herein incorporated by reference) which codes for kanamycin resistance and can be selected for using kanamycin, G418, etc.; a bar gene which codes for bialaphos resistance; a mutant EPSP synthase gene (Hinchee et al., Bio/Technology 6:915-922 (1988), the entirety of which is herein incorporated by reference) which encodes glyphosate resistance; a nitrilase gene which confers resistance to bromoxynil (Stalker et al., J. Biol. Chem. 263:6310-6314 (1988), the entirety of which is herein incorporated by reference); a mutant acetolactate synthase gene (ALS) which confers imidazolinone or sulphonylurea resistance (European Patent Application 154,204 (Sep. 11, 1985), the entirety of which is herein incorporated by reference); and a methotrexate resistant DHFR gene (Thillet et al., J. Biol. Chem. 263:12500-12508 (1988), the entirety of which is herein incorporated by reference).

[0202] A vector or construct may also include a transit peptide. Incorporation of a suitable chloroplast transit peptide may also be employed (European Patent Application Publication Number 0218571, the entirety of which is herein incorporated by reference). Translational enhancers may also be incorporated as part of the vector DNA. DNA constructs could contain one or more 5′ non-translated leader sequences which may serve to enhance expression of the gene products from the resulting mRNA transcripts. Such sequences may be derived from the promoter selected to express the gene or can be specifically modified to increase translation of the mRNA. Such regions may also be obtained from viral RNAs, from suitable eukaryotic genes, or from a synthetic gene sequence. For a review of optimizing expression of transgenes, see Koziel et al., Plant Mol. Biol. 32:393-405 (1996), the entirety of which is herein incorporated by reference.

[0203] A vector or construct may also include a screenable marker. Screenable markers may be used to monitor expression. Exemplary screenable markers include a β-glucuronidase or uidA gene (GUS) which encodes an enzyme for which various chromogenic substrates are known (Jefferson, Plant Mol. Biol, Rep. 5: 387-405 (1987), the entirety of which is herein incorporated by reference; Jefferson et al., EMBO J. 6: 3901-3907 (1987), the entirety of which is herein incorporated by reference); an R-locus gene, which encodes a product that regulates the production of anthocyanin pigments (red color) in plant tissues ((Dellaporta et al., Stadler Symposium 11:263-282 (1988), the entirety of which is herein incorporated by reference); a β-lactamase gene (Sutcliffe et al., Proc. Natl. Acad. Sci. (U.S.A.) 75: 3737-3741 (1978), the entirety of which is herein incorporated by reference), a gene which encodes an enzyme for which various chromogenic substrates are known (e.g., PADAC, a chromogenic cephalosporin); a luciferase gene (Ow et al., Science 234: 856-859 (1986), the entirety of which is herein incorporated by reference) a xylE gene (Zukowsky et al., Proc. Natl. Acad. Sci. (U.S.A.) 80:1101-1105 (1983), the entirety of which is herein incorporated by reference) which encodes a catechol diozygenase that can convert chromogenic catechols; an a-amylase gene (Ikatu et al., Bio/Technol. 8:241-242 (1990), the entirety of which is herein incorporated by reference); a tyrosinase gene (Katz et al., J. Gen. Microbiol. 129:2703-2714 (1983), the entirety of which is herein incorporated by reference) which encodes an enzyme capable of oxidizing tyrosine to DOPA and dopaquinone which in turn condenses to melanin; an α-galactosidase, which will turn a chromogenic α-galactose substrate.

[0204] Included within the terms “selectable or screenable marker genes” are also genes which encode a scriptable marker whose secretion can be detected as a means of identifying or selecting for transformed cells. Examples include markers which encode a secretable antigen that can be identified by antibody interaction, or even secretable enzymes which can be detected catalytically. Secretable proteins fall into a number of classes, including small, diffusible proteins detectable, e.g., by ELISA, small active enzymes detectable in extracellular solution (e.g., α-amylase, β-lactamase, phosphinothricin transferase), or proteins which are inserted or trapped in the cell wall (such as proteins which include a leader sequence such as that found in the expression unit of extension or tobacco PR-S). Other possible selectable and/or screenable marker genes will be apparent to those of skill in the art.

[0205] Methods and compositions for transforming a bacteria and other microorganisms are known in the art (see for example Sambrook et al., Molecular Cloning: A Laboratory Manual, Second Edition, Cold Spring Harbor Laboratory Press, Cold Spring Harbor, N.Y., (1989), the entirety of which is herein incorporated by reference).

[0206] There are many methods for introducing transforming nucleic acid molecules into plant cells. Suitable methods are believed to include virtually any method by which nucleic acid molecules may be introduced into a cell, such as by Agrobacterium infection or direct delivery of nucleic acid molecules such as, for example, by PEG-mediated transformation, by electroporation or by acceleration of DNA coated particles, etc. (Pottykus, Ann. Rev. Plant Physiol. Plant Mol. Biol. 42:205-225 (1991), the entirety of which is herein incorporated by reference; Vasil, Plant Mol. Biol. 25: 925-937 (1994), the entirety of which is herein incorporated by reference. For example, electroporation has been used to transform maize protoplasts (Fromm et al., Nature 312:791-793 (1986), the entirety of which is herein incorporated by reference).

[0207] Other vector systems suitable for introducing transforming DNA into a host plant cell includes but is not limited to binary artificial chromosome (BIBAC) vectors (Hamilton et al., Gene 200:107-116, (1997), the entirety of which is herein incorporated by reference, and transfection with RNA viral vectors (Della-Cioppa et al., Ann. N.Y. Acad. Sci. (1996), 792 (Engineering Plants for Commercial Products and Applications), 57-61, the entirety of which is herein incorporated by reference.

[0208] Technology for introduction of DNA into cells is well known to those of skill in the art. Four general methods for delivering a gene into cells have been described: (1) chemical methods (Graham and van der Eb, Virology, 54:536-539 (1973), the entirety of which is herein incorporated by reference); (2) physical methods such as microinjection (Capecchi, Cell 22:479-488 (1980), electroporation (Wong and Neumann, Biochem. Biophys. Res. Commun., 107:584-587 (1982); Fromm et al., Proc. Natl. Acad. Sci. USA, 82:5824-5828 (1985); U.S. Pat. No. 5,384,253; and the gene gun (Johnston and Tang, Methods Cell Biol. 43:353-365 (1994), all of which the entirety is herein incorporated by reference; (3) viral vectors (Clapp, Clin. Perinatol., 20:155-168 (1993); Lu et al., J. Exp. Med., 178:2089-2096 (1993); Eglitis and Anderson, Biotechniques, 6:608-614 (1988), all of which the entirety is herein incorporated by reference); and (4) receptor-mediated mechanisms (Curiel et al., Hum. Gen. Ther., 3:147-154 (1992); Wagner et al., Proc. Natl. Acad. Sci. USA, 89:6099-6103 (1992), all of which the entirety is herein incorporated by reference).

[0209] Acceleration methods that may be used include, for example, microprojectile bombardment and the like. One example of a method for delivering transforming nucleic acid molecules to plant cells is microprojectile bombardment. This method has been reviewed by Yang and Christou, eds., Particle Bombardment Technology for Gene Transfer, Oxford Press, Oxford, England (1994), the entirety of which is herein incorporated by reference). Non-biological particles (microprojectiles) that may be coated with nucleic acids and delivered into cells by a propelling force. Exemplary particles include those comprised of tungsten, gold, platinum, and the like.

[0210] A particular advantage of microprojectile bombardment, in addition to it being an effective means of reproducibly, and stably transforming monocotyledons, is that neither the isolation of protoplasts (Cristou et al., Plant Physiol. 87:671-674 (1988), the entirety of which is herein incorporated by reference) nor the susceptibility of Agrobacterium infection is required. An illustrative embodiment of a method for delivering DNA into maize cells by acceleration is a biolistics g-particle delivery system, which can be used to propel particles coated with DNA through a screen, such as a stainless steel or Nytex screen, onto a filter surface covered with corn cells cultured in suspension. Gordon-Kamm et al., describes the basic procedure for coating tungsten particles with DNA (Gordon-Kamm et al., Plant Cell 2: 603-618 (1990), the entirety of which is herein incorporated by reference). The screen disperses the tungsten nucleic acid particles so that they are not delivered to the recipient cells in large aggregates. A particle delivery system suitable for use with the present invention is the helium acceleration PDS-1000/He gun which is available from Bio-Rad Laboratories (Bio-Rad, Hercules, Calif.)(Sanford et al., Technique 3:3-16 (1991), the entirety of which is herein incorporated by reference).

[0211] For the bombardment, cells in suspension may be concentrated on filters. Filters containing the cells to be bombarded are positioned at an appropriate distance below the microprojectile stopping plate. If desired, one or more screens are also positioned between the gun and the cells to be bombarded.

[0212] Alternatively, immature embryos or other target cells may be arranged on solid culture medium. The cells to be bombarded are positioned at an appropriate distance below the macroprojectile stopping plate. If desired, one or more screens are also positioned between the acceleration device and the cells to be bombarded. Through the use of techniques set forth herein one may obtain up to 1000 or more foci of cells transiently expressing a marker gene. The number of cells in a focus which express the exogenous gene product 48 hours post-bombardment often range from one to ten and average one to three.

[0213] In bombardment transformation, one may optimize the prebombardment culturing conditions and the bombardment parameters to yield the maximum numbers of stable transformants. Both the physical and biological parameters for bombardment are important in this technology. Physical factors are those that involve manipulating the DNA/microprojectile precipitate or those that affect the flight and velocity of either the macro- or microprojectiles. Biological factors include all steps involved in manipulation of cells before and immediately after bombardment, the osmotic adjustment of target cells to help alleviate the trauma associated with bombardment, and also the nature of the transforming DNA, such as linearized DNA or intact supercoiled plasmids. It is believed that pre-bombardment manipulations are especially important for successful transformation of immature embryos. In another alternative embodiment, plastids can be stably transformed. Methods disclosed for plastid transformation in higher plants include the particle gun delivery of DNA containing a selectable marker and targeting of the DNA to the plastid genome through homologous recombination (Svab et al., Proc. Natl. Acad. Sci. (U.S.A.) 87:8526-8530 (1990); Svab and Maliga, Proc. Natl. Acad. Sci. (U.S.A.) 90:913-917 (1993); Staub and Maliga, EMBO J. 12:601-606 (1993); U.S. Pat. Nos. 5,451,513 and 5,545,818, all of which are herein incorporated by reference in their entirety).

[0214] Accordingly, it is contemplated that one may wish to adjust various aspects of the bombardment parameters in small scale studies to fully optimize the conditions. One may particularly wish to adjust physical parameters such as gap distance, flight distance, tissue distance, and helium pressure. One may also minimize the trauma reduction factors by modifying conditions which influence the physiological state of the recipient cells and which may therefore influence transformation and integration efficiencies. For example, the osmotic state, tissue hydration and the subculture stage or cell cycle of the recipient cells may be adjusted for optimum transformation. The execution of other routine adjustments will be known to those of skill in the art in light of the present disclosure.

[0215] Agrobacterium-mediated transfer is a widely applicable system for introducing genes into plant cells because the DNA can be introduced into whole plant tissues, thereby bypassing the need for regeneration of an intact plant from a protoplast. The use of Agrobacterium-mediated plant integrating vectors to introduce DNA into plant cells is well known in the art. See, for example the methods described (Fraley et al., Biotechnology 3:629-635 (1985); Rogers et al., Meth. In Enzymol, 153:253-277 (1987), both of which are herein incorporated by reference in their entirety. Further, the integration of the Ti-DNA is a relatively precise process resulting in few rearrangements. The region of DNA to be transferred is defined by the border sequences, and intervening DNA is usually inserted into the plant genome as described (Spielmann et al., Mol. Gen. Genet., 205:34 (1986), the entirety of which is herein incorporated by reference).

[0216] Modem Agrobacterium transformation vectors are capable of replication in E. coli as well as Agrobacterium, allowing for convenient manipulations as described (Klee et al., In: Plant DNA Infectious Agents, T. Hohn and J. Schell, eds., Springer-Verlag, New York, pp. 179-203 (1985), the entirety of which is herein incorporated by reference. Moreover, recent technological advances in vectors for Agrobacterium-mediated gene transfer have improved the arrangement of genes and restriction sites in the vectors to facilitate construction of vectors capable of expressing various polypeptide coding genes. The vectors described have convenient multi-linker regions flanked by a promoter and a polyadenylation site for direct expression of inserted polypeptide coding genes and are suitable for present purposes (Rogers et al., Meth. In Enzymol., 153:253-277 (1987), the entirety of which is herein incorporated by reference). In addition, Agrobacterium containing both armed and disarmed Ti genes can be used for the transformations. In those plant strains where Agrobacterium-mediated transformation is efficient, it is the method of choice because of the facile and defined nature of the gene transfer.

[0217] A transgenic plant formed using Agrobacterium transformation methods typically contains a single gene on one chromosome. Such transgenic plants can be referred to as being heterozygous for the added gene. More preferred is a transgenic plant that is homozygous for the added structural gene; i.e., a transgenic plant that contains two added genes, one gene at the same locus on each chromosome of a chromosome pair. A homozygous transgenic plant can be obtained by sexually mating (selfing) an independent segregant transgenic plant that contains a single added gene, germinating some of the seed produced and analyzing the resulting plants produced for the gene of interest.

[0218] It is also to be understood that two different transgenic plants can also be mated to produce offspring that contain two independently segregating added, exogenous genes. Selfing of appropriate progeny can produce plants that are homozygous for both added, exogenous genes that encode a polypeptide of interest. Back-crossing to a parental plant and out-crossing with a non-transgenic plant are also contemplated, as is vegetative propagation.

[0219] Transformation of plant protoplasts can be achieved using methods based on calcium phosphate precipitation, polyethylene glycol treatment, electroporation, and combinations of these treatments. See for example (Potrykus et al., Mol. Gen. Genet., 205:193-200 (1986); Lorz et al., Mol. Gen. Genet., 199:178, (1985); Fromm et al., Nature, 319:791,(1986); Uchimiya et al., Mol. Gen. Genet.:204:204, (1986); Callis et al., Genes and Development, 1183,(1987); Marcotte et al., Nature, 335:454, (1988), all of which are herein incorporated by reference in their entirety).

[0220] Application of these systems to different plant strains depends upon the ability to regenerate that particular plant strain from protoplasts. Illustrative methods for the regeneration of cereals from protoplasts are described (Fujimura et al., Plant Tissue Culture Letters, 2:74,(1985); Toriyama et al., Theor Appl. Genet. 205:34. (1986); Yamada et al., Plant Cell Rep., 4:85, (1986); Abdullah et al., Biotechnology, 4:1087, (1986), all of which are herein incorporated by reference in their entirety).

[0221] To transform plant strains that cannot be successfully regenerated from protoplasts, other ways to introduce DNA into intact cells or tissues can be utilized. For example, regeneration of cereals from immature embryos or explants can be effected as described (Vasil, Biotechnology, 6:397,(1988), the entirety of which is herein incorporated by reference). In addition, “particle gun” or high-velocity microprojectile technology can be utilized (Vasil et al., Bio/Technology 10:667, (1992), the entirety of which is herein incorporated by reference).

[0222] Using the latter technology, DNA is carried through the cell wall and into the cytoplasm on the surface of small metal particles as described (Klein et al., Nature, 328:70, (1987); Klein et al., Proc. Natl. Acad. Sci. USA, 85:8502-8505, (1988); McCabe et al., Biotechnology, 6:923, (1988), all of which are herein incorporated by reference in their entirety). The metal particles penetrate through several layers of cells and thus allow the transformation of cells within tissue explants.

[0223] Other methods of cell transformation can also be used and include but are not limited to introduction of DNA into plants by direct DNA transfer into pollen (Hess et al., Intern Rev. Cytol., 107:367, (1987); Luo et al., Plant Mol Biol. Reporter, 6:165, (1988), all of which are herein incorporated by reference in their entirety), by direct injection of DNA into reproductive organs of a plant (Pena et al., Nature, 325:274, (1987), the entirety of which is herein incorporated by reference), or by direct injection of DNA into the cells of immature embryos followed by the rehydration of dessicated embryos (Neuhaus et al., Theor. Appl. Genet., 75:30, (1987), the entirety of which is herein incorporated by reference).

[0224] The regeneration, development, and cultivation of plants from single plant protoplast transformants or from various transformed explants is well known in the art (Weissbach and Weissbach, In: Methods for Plant Molecular Biology, (Eds.), Academic Press, Inc. San Diego, Calif., (1988), the entirety of which is herein incorporated by reference). This regeneration and growth process typically includes the steps of selection of transformed cells, culturing those individualized cells through the usual stages of embryonic development through the rooted plantlet stage. Transgenic embryos and seeds are similarly regenerated. The resulting transgenic rooted shoots are thereafter planted in an appropriate plant growth medium such as soil.

[0225] The development or regeneration of plants containing the foreign, exogenous gene that encodes a protein of interest is well known in the art. Preferably, the regenerated plants are self-pollinated to provide homozygous transgenic plants, as discussed before. Otherwise, pollen obtained from the regenerated plants is crossed to seed-grown plants of agronomically important lines. Conversely, pollen from plants of these important lines is used to pollinate regenerated plants. A transgenic plant of the present invention containing a desired polypeptide is cultivated using methods well known to one skilled in the art.

[0226] There are a variety of methods for the regeneration of plants from plant tissue. The particular method of regeneration will depend on the starting plant tissue and the particular plant species to be regenerated.

[0227] Methods for transforming dicots, primarily by use of Agrobacterium tumefaciens, and obtaining transgenic plants have been published for cotton (U.S. Pat. No. 5,004,863, U.S. Pat. No. 5,159,135, U.S. Pat. No. 5,518,908, all of which the entirety is herein incorporated by reference); soybean (U.S. Pat. No. 5,569,834, U.S. Pat. No. 5,416,011, McCabe et al., Biotechnology 6:923, (1988), Christou et al., Plant Physiol., 87:671-674 (1988), all of which are herein incorporated by reference in their entirety); Brassica ( U.S. Pat. No. 5,463,174, the entirety of which is herein incorporated by reference); peanut (Cheng et al., Plant Cell Rep. 15: 653-657 (1996), McKently et al., Plant Cell Rep. 14:699-703 (1995), all of which are herein incorporated by reference in their entirety); papaya (Yang et al., (1996), the entirety of which is herein incorporated by reference); pea (Grant et al., Plant Cell Rep. 15:254-258, (1995), the entirety of which is herein incorporated by reference).

[0228] Transformation of monocotyledons using electroporation, particle bombardment, and Agrobacterium have also been reported. Transformation and plant regeneration have been achieved in asparagus (Bytebier et al., Proc. Natl. Acad. Sci. USA 84:5345, (1987), the entirety of which is herein incorporated by reference); barley (Wan and Lemaux, Plant Physiol 104:37, (1994), the entirety of which is herein incorporated by reference); maize (Rhodes et al., Science 240: 204, (1988), Gordon-Kamm et al., Plant Cell, 2:603, (1990), Fromm et al., Bio/Technology 8:833, (1990), Koziel et al., Bio/Technology 11:194, (1993), Armstrong et al., Crop Science 35:550-557, (1995), all of which the entirety is herein incorporated by reference); oat (Somers et al., Bio/Technology, 10:1589, (1992), the entirety of which is herein incorporated by reference); orchardgrass (Horn et al.,Plant Cell Rep. 7:469, (1988), the entirety of which is herein incorporated by reference); rice (Toriyama et al., Theor Appl. Genet. 205:34, (1986); Park et al., Plant Mol. Biol.,32: 1135-1148, (1996); Abedinia et al., Aust. J. Plant Physiol.24:133-141, (1997); Zhang and Wu, Theor. Appl. Genet. 76:835, (1988); Zhang et al. Plant Cell Rep. 7:379, (1988); Battraw and Hall, Plant Sci. 86:191-202, (1992); Christou et al., Bio/Technology 9:957, (1991), all of which are herein incorporated by reference in its entirety); sugarcane (Bower and Birch, Plant J. 2:409, (1992), the entirety of which is herein incorporated by reference); tall fescue (Wang et al., Bio/Technology 10:691, (1992), the entirety of which is herein incorporated by reference), and wheat (Vasil et al., Bio/Technology 10:667, (1992); U.S. Pat. No. 5,631,152, both of which are herein incorporated by reference in their entirety).

[0229] Assays for gene expression based on the transient expression of cloned nucleic acid constructs have been developed by introducing the nucleic acid molecules into plant cells by polyethylene glycol treatment, electroporation, or particle bombardment (Marcotte, et al., Nature, 335: 454-457 (1988); Marcotte, et al., Plant Cell, 1: 523-532 (1989); McCarty, et al., Cell 66: 895-905 (1991); Hattori, et al., Genes Dev. 6: 609-618 (1992); Goff, et al., EMBO J. 9: 2517-2522 (1990), all of which are herein incorporated by reference in their entirety). Transient expression systems may be used to functionally dissect gene constructs (See generally, Mailga et al., Methods in Plant Molecular Biology, Cold Spring Harbor Press (1995)).

[0230] Any of the nucleic acid molecules of the present invention may be introduced into a plant cell in a permanent or transient manner in combination with other genetic elements such as vectors, promoters enhancers etc. Further any of the nucleic acid molecules of the present invention may be introduced into a plant cell in a manner that allows for over expression of the protein or fragment thereof encoded by the nucleic acid molecule.

[0231] Cosuppression is the reduction in expression levels, usually at the level of RNA, of a particular endogenous gene or gene family by the expression of a homologous sense construct that is capable of transcribing mRNA of the same strandedness as the transcript of the endogenous gene (Napoli et al., Plant Cell 2: 279-289 (1990); van der Krol et al., Plant Cell 2: 291-299 (1990), both of which are herein incorporated by reference in their entirety). Cosuppression may result from stable transformation with a single copy nucleic acid molecule that is homologous to a nucleic acid sequence found with the cell (Prolls and Meyer, Plant J. 2:465-475 (1992), the entirety of which is herein incorporated by reference) or with multiple copies of a nucleic acid molecule that is homologous to a nucleic acid sequence found with the cell (Mittlesten et al., Mol. Gen. Genet. 244: 325-330 (1994), the entirety of which is herein incorporated by reference). Genes, even though different, linked to homologous promoters may result in the cosuppression of the linked genes (Vaucheret C.R. Acad. Sci III 316: 1471-1483 (1993), the entirety of which is herein incorporated by reference).

[0232] This technique has, for example been applied to generate white flowers from red petunia and tomatoes that do not ripen on the vine. Up to 50% of petunia transformants that contained a sense copy of the chalcone synthase (CHS) gene produced white flowers or floral sectors; this was as a result of the post-transcriptional loss of mRNA encoding CHS (Flavell, Proc. Natl. Acad. Sci. (U.S.A.) 91:3490-3496 (1994)), the entirety of which is herein incorporated by reference). Cosuppression may require the coordinate transcription of the transgene and the endogenous gene, and can be reset by a developmental control mechanism (Jorgensen, Trends Biotechnol, 8:340344 (1990); Meins and Kunz, In: Gene Inactivation and Homologous Recombination in Plants (Paszkowski, J., ed.), pp. 335-348. Kluwer Academic, Netherlands (1994), both of which are herein incorporated by reference in their entirety).

[0233] It is understood that one or more of the nucleic acids of the present invention including those comprising SEQ ID NO:1 through SEQ ID NO:4930 or complement thereof or fragments of either or other nucleic acid molecules of the present invention may be introduced into a plant cell and transcribed using an appropriate promoter with such transcription resulting in the co-suppression of an endogenous protein.

[0234] Antisense approaches are a way of preventing or reducing gene function by targeting the genetic material (Mol et al., FEBS Lett. 268: 427-430 (1990), the entirety of which is herein incorporated by reference). The objective of the antisense approach is to use a sequence complementary to the target gene to block its expression and create a mutant cell line or organism in which the level of a single chosen protein is selectively reduced or abolished. Antisense techniques have several advantages over other ‘reverse genetic’ approaches. The site of inactivation and its developmental effect can be manipulated by the choice of promoter for antisense genes or by the timing of external application or microinjection. Antisense can manipulate its specificity by selecting either unique regions of the target gene or regions where it shares homology to other related genes (Hiatt et al., In Genetic Engineering, Setlow (ed.), Vol. 11, New York: Plenum 49-63 (1989), the entirety of which is herein incorporated by reference).

[0235] The principle of regulation by antisense RNA is that RNA that is complementary to the target mRNA is introduced into cells, resulting in specific RNA:RNA duplexes being formed by base pairing between the antisense substrate and the target mRNA (Green et al., Annu. Rev. Biochem. 55: 569-597 (1986), the entirety of which is herein incorporated by reference). Under one embodiment, the process involves the introduction and expression of an antisense gene sequence. Such a sequence is one in which part or all of the normal gene sequences are placed under a promoter in inverted orientation so that the ‘wrong’ or complementary strand is transcribed into a noncoding antisense RNA that hybridizes with the target mRNA and interferes with its expression (Takayama and Inouye, Crit. Rev. Biochem. Mol. Biol. 25: 155-184 (1990), the entirety of which is herein incorporated by reference). An antisense vector is constructed by standard procedures and introduced into cells by transformation, transfection, electroporation, microinjection, or by infection, etc. The type of transformation and choice of vector will determine whether expression is transient or stable. The promoter used for the antisense gene may influence the level, timing, tissue, specificity, or inducibility of the antisense inhibition.

[0236] It is understood that protein synthesis activity in a plant cell may be reduced or depressed by growing a transformed plant cell containing a nucleic acid molecule whose non-transcribed strand encodes a protein or fragment thereof.

[0237] Antibodies have been expressed in plants (Hiatt et al., Nature 342:76-78 (1989); Conrad and Fielder, Plant Mol. Biol. 26: 1023-1030 (1994), both of which are herein incorporated by reference in their entirety). Cytoplamic expression of a scFv (single-chain Fv antibodies) has been reported to delay infection by artichoke mottled crinkle virus. Transgenic plants that express antibodies directed against endogenous proteins may exhibit a physiological effect (Philips et al., EMBO J. 16: 4489-4496 (1997); Marion-Poll, Trends in Plant Science 2: 447-448 (1997), all of which are herein incorporated by reference in their entirety). For example, expressed anti-abscisic antibodies reportedly result in a general perturbation of seed development (Philips et al., EMBO J. 16: 4489-4496 (1997)).

[0238] Antibodies that are catalytic may also be expressed in plants (abzymes). The principle behind abzymes is that since antibodies may be raised against many molecules, this recognition ability can be directed toward generating antibodies that bind transition states to force a chemical reaction forward (Persidas, Nature Biotechnology 15:1313-1315 (1997); Baca et al., Ann. Rev. Biophys. Biomol. Struct. 26:461-493 (1997), both of which are herein incorporated by reference in their entirety). The catalytic abilities of abzymes may be enhanced by site directed mutagensis. Examples of abzymes are, for example, set forth in U.S. Pat. No: 5,658,753; U.S. Pat. No. 5,632,990; U.S. Pat. No. 5,631,137; U.S. Pat. No. 5,602,015; U.S. Pat. No. 5,559,538; U.S. Pat. No. 5,576,174; U.S. Pat. No. 5,500,358; U.S. Pat. No. 5,318,897; U.S. Pat. No. 5,298,409; U.S. Pat. No. 5,258,289 and U.S. Pat. No. 5,194,585, all of which are herein incorporated in their entirety.

[0239] It is understood that any of the antibodies of the present invention may be expressed in plants and that such expression can result in a physiological effect. It is also understood that any of the expressed antibodies may be catalytic.

[0240] In addition to the above discussed procedures, practitioners are familiar with the standard resource materials which describe specific conditions and procedures for the construction, manipulation and isolation of macromolecules (e.g., DNA molecules, plasmids, etc.), generation of recombinant organisms and the screening and isolating of clones, (see for example, Sambrook et al., Molecular Cloning: A Laboratory Manual, Cold Spring Harbor Press (1989); Mailga et al., Methods in Plant Molecular Biology, Cold Spring Harbor Press (1995); Birren et al., Genome Analysis: Analyzing DNA, 1, Cold Spring Harbor, N.Y., all of which are herein incorporated by reference in their entirety).

[0241] The nucleotide sequence provided in SEQ ID NO:1, through SEQ ID NO:4930 or fragment thereof, or complement thereof, or a nucleotide sequence at least 90% identical, preferably 95%, identical even more preferably 99% or 100% identical to the sequence provided in SEQ ID NO:1 through SEQ ID NO:4930 or fragment thereof, or complement thereof, can be “provided” in a variety of mediums to facilitate use fragment thereof. Such a medium can also provide a subset thereof in a form that allows a skilled artisan to examine the sequences.

[0242] In one application of this embodiment, a nucleotide sequence of the present invention can be recorded on computer readable media. As used herein, “computer readable media” refers to any medium that can be read and accessed directly by a computer. Such media include, but are not limited to: magnetic storage media, such as floppy discs, hard disc, storage medium, and magnetic tape: optical storage media such as CD-ROM; electrical storage media such as RAM and ROM; and hybrids of these categories such as magnetic/optical storage media. A skilled artisan can readily appreciate how any of the presently known computer readable mediums can be used to create a manufacture comprising computer readable medium having recorded thereon a nucleotide sequence of the present invention.

[0243] As used herein, “recorded” refers to a process for storing information on computer readable medium. A skilled artisan can readily adopt any of the presently known methods for recording information on computer readable medium to generate media comprising the nucleotide sequence information of the present invention. A variety of data storage structures are available to a skilled artisan for creating a computer readable medium having recorded thereon a nucleotide sequence of the present invention. The choice of the data storage structure will generally be based on the means chosen to access the stored information. In addition, a variety of data processor programs and formats can be used to store the nucleotide sequence information of the present invention on computer readable medium. The sequence information can be represented in a word processing text file, formatted in commercially-available software such as WordPerfect and Microsoft Word, or represented in the form of an ASCII file, stored in a database application, such as DB2, Sybase, Oracle, or the like. A skilled artisan can readily adapt any number of data processor structuring formats (e.g. text file or database) in order to obtain computer readable medium having recorded thereon the nucleotide sequence information of the present invention.

[0244] By providing one or more of nucleotide sequences of the present invention, a skilled artisan can routinely access the sequence information for a variety of purposes. Computer software is publicly available which allows a skilled artisan to access sequence information provided in a computer readable medium. The examples which follow demonstrate how software which implements the BLAST (Altschul et al., J. Mol. Biol. 215:403-410 (1990)) and BLAZE (Brutlag et al., Comp. Chem. 17:203-207 (1993), the entirety of which is herein incorporated by reference) search algorithms on a Sybase system can be used to identify open reading frames (ORFs) within the genome that contain homology to ORFs or proteins from other organisms. Such ORFs are protein-encoding fragments within the sequences of the present invention and are useful in producing commercially important proteins such as enzymes used in amino acid biosynthesis, metabolism, transcription, translation, RNA processing, nucleic acid and a protein degradation, protein modification, and DNA replication, restriction, modification, recombination, and repair.

[0245] The present invention further provides systems, particularly computer-based systems, which contain the sequence information described herein. Such systems are designed to identify commercially important fragments of the nucleic acid molecule of the present invention. As used herein, “a computer-based system” refers to the hardware means, software means, and data storage means used to analyze the nucleotide sequence information of the present invention. The minimum hardware means of the computer-based systems of the present invention comprises a central processing unit (CPU), input means, output means, and data storage means. A skilled artisan can readily appreciate that any one of the currently available computer-based system are suitable for use in the present invention.

[0246] As indicated above, the computer-based systems of the present invention comprise a data storage means having stored therein a nucleotide sequence of the present invention and the necessary hardware means and software means for supporting and implementing a search means. As used herein, “data storage means” refers to memory that can store nucleotide sequence information of the present invention, or a memory access means which can access manufactures having recorded thereon the nucleotide sequence information of the present invention. As used herein, “search means” refers to one or more programs which are implemented on the computer-based system to compare a target sequence or target structural motif with the sequence information stored within the data storage means. Search means are used to identify fragments or regions of the sequence of the present invention that match a particular target sequence or target motif. A variety of known algorithms are disclosed publicly and a variety of commercially available software for conducting search means are available and can be used in the computer-based systems of the present invention. Examples of such software include, but are not limited to, MacPattern (EMBL), BLASTIN and BLASTIX (NCBIA). One of the available algorithms or implementing software packages for conducting homology searches can be adapted for use in the present computer-based systems.

[0247] The most preferred sequence length of a target sequence is from about 10 to 100 amino acids or from about 30 to 300 nucleotide residues. However, it is well recognized that during searches for commercially important fragments of the nucleic acid molecules of the present invention, such as sequence fragments involved in gene expression and protein processing, may be of shorter length.

[0248] As used herein, “a target structural motif,” or “target motif,” refers to any rationally selected sequence or combination of sequences in which the sequences or sequence(s) are chosen based on a three-dimensional configuration which is formed upon the folding of the target motif. There are a variety of target motifs known in the art. Protein target motifs include, but are not limited to, enzymatic active sites and signal sequences. Nucleic acid target motifs include, but are not limited to, promoter sequences, cis elements, hairpin structures and inducible expression elements (protein binding sequences).

[0249] Thus, the present invention further provides an input means for receiving a target sequence, a data storage means for storing the target sequences of the present invention sequence identified using a search means as described above, and an output means for outputting the identified homologous sequences. A variety of structural formats for the input and output means can be used to input and output information in the computer-based systems of the present invention. A preferred format for an output means ranks fragments of the sequence of the present invention by varying degrees of homology to the target sequence or target motif. Such presentation provides a skilled artisan with a ranking of sequences which contain various amounts of the target sequence or target motif and identifies the degree of homology contained in the identified fragment.

[0250] A variety of comparing means can be used to compare a target sequence or target motif with the data storage means to identify sequence fragments sequence of the present invention. For example, implementing software which implement the BLAST and BLAZE algorithms (Altschul et al., J. Mol. Biol. 215:403-410 (1990)) can be used to identify open frames within the nucleic acid molecules of the present invention. A skilled artisan can readily recognize that any one of the publicly available homology search programs can be used as the search means for the computer-based systems of the present invention. Having now generally described the invention, the same will be more readily understood through reference to the following examples which are provided by way of illustration, and are not intended to be limiting of the present invention, unless specified.

### EXAMPLE 1

[0251] The LIB3493 cDNA library is generated from male reproductive tissue (androecium) harvested from 2-3 month old plants. The Gossypium hirsutum variety Nucotton33B is used for collection. Seeds are planted in trays containing Metromix 350 potting soil premixed with fertilizers. Plants are grown in a greenhouse in 16 hr day/8 hr night cycles with an average relative humidity of ca. 50%. Daytime and night time temperature are 90° F. and 74° F. respectively. Daytime light levels are measured at 600-1000 mEinsteins/m². Plants are watered daily in the morning and as needed in the afternoon. Plants receive 1 or 2 applications of Pix to control excessive growth. Open flowers are harvested from 2-3 month old plants and dissected to separate the male reproductive tissue (androecium) tissue from other tissues. The collected androcium includes filaments, anthers and pollens. The harvested androecium is immediately frozen in liquid nitrogen and then stored at −80° C. until total RNA preparation.

[0252] For RNA preparation, the stored tissue is grounded thoroughly in liquid nitrogen and then incubated with a high SDS solution (about 2.5% SDS by weight, 0.1 M Tris-HCl (pH7.5), 2.5 M sodium perchlorate, 0.1% b-mercaptoethanol by volume) and insoluble PVPP (about 8.5% by weight) for about 30 minutes at the room temperature. Nucleic acids are then precipitated after filtration. The total RNA is isolated from the precipitate using Trizol reagent from Life Technologies (Gibco BRL, Life Technologies, Gaithersburg, Md. U.S.A.), essentially as recommended by the manufacturer. Poly A+ RNA (mRNA) is purified using magnetic oligo dT beads essentially as recommended by the manufacturer (Dynabeads, Dynal Corporation, Lake Success, N.Y. U.S.A.).

[0253] Construction of plant cDNA libraries is well-known in the art and a number of cloning strategies exist. A number of cDNA library construction kits are commercially available. The Superscript™ Plasmid System for cDNA synthesis and Plasmid Cloning (Gibco BRL, Life Technologies, Gaithersburg, Md., U.S.A.) is used, following the conditions suggested by the manufacturer.

### EXAMPLE 2

[0254] The cDNA libraries are plated on LB agar containing the appropriate antibiotics for selection and incubated at 37° for a sufficient time to allow the growth of individual colonies. Single colonies are individually placed in each well of a 96-well microtiter plates containing LB liquid including the selective antibiotics. The plates are incubated overnight at approximately 37° C. with gentle shaking to promote growth of the cultures. The plasmid DNA is isolated from each clone using Qiaprep plasmid isolation kits, using the conditions recommended by the manufacturer (Qiagen Inc., Santa Clara, Calif. U.S.A.).

[0255] The template plasmid DNA clones are used for subsequent sequencing. For sequencing the cDNA library LIB3493, a commercially available sequencing kit, such as the ABI PRISM dRhodamine Terminator Cycle Sequencing Ready Reaction Kit with AmpliTaq® DNA Polymerase, FS, is used under the conditions recommended by the manufacturer (PE Applied Biosystems, Foster City, Calif.). The ESTs of the present invention are generated by sequencing initiated from the 5′ end of each cDNA clone.

[0256] A number of sequencing techniques are known in the art, including fluorescence-based sequencing methodologies. These methods have the detection, automation and instrumentation capability necessary for the analysis of large volumes of sequence data. Currently, the 377 DNA Sequencer (Perkin-Elmer Corp., Applied Biosystems Div., Foster City, Calif.) allows the most rapid electrophoresis and data collection. With these types of automated systems, fluorescent dye-labeled sequence reaction products are detected and data entered directly into the computer, producing a chromatogram that is subsequently viewed, stored, and analyzed using the corresponding software programs. These methods are known to those of skill in the art and have been described and reviewed (Birren et al., Genome Analysis: Analyzing DNA, 1, Cold Spring Harbor, N.Y., the entirety of which is herein incorporated by reference).

The application's sequence listing, which the Patent Office published only in electronic form, follows.

SEQUENCE LISTING (4930 sequences)

SEQ ID NO: 1 - DNA, 262 bp, Gossypium hirsutum
  Clone ID: LIB3493-042-P1-M1-H11
cggacgcgtgggctggggtacaataaatgaaccattgcatattgctgtgggagggtatgatacaggaagatctgcccctgggagaaatcacaattcatcaattgaaacatatttggctgcacaccatatgattttggcacatgctgctgctgtttccatatatcatagcaagtacaaggataagcaagggggacagatagggttagtggtggactgtgaatgggccgaagctaattcagataaaatttaatattcaactttc

SEQ ID NO: 2 - DNA, 330 bp, Gossypium hirsutum
  unsure (1)..(330): unsure at all n locations; Clone ID: LIB3493-042-P1-M1-H2
tctcaatccccagaaaagatcatgaataaaacatcacaaganatcccctctactattttgaggacatcaactcggagaaaacctaccaaggaagagcatcaaactgcacaatcgactgtcccaacccgaaaaacgacaagaagaacagctgaattggatgaagaaaacaagaacctgaatgtgactgagactgagactcctgctgtgactactaacaccagcaagagggctaagaaaactgaacctgaagttaaggatcaataggaagagtgatttggttgagacaccagctttgcagagtggcaggagaaagtctggagtgggatctac

SEQ ID NO: 3 - DNA, 235 bp, Gossypium hirsutum
  Clone ID: LIB3493-042-P1-M1-H3
tcgacccatgcctaccgcggttcattcgtgccatttactgatactaatgatgttcagagcgggccaatcactgggaggcatacttatgtagatgagtgattgaccaactgttactcaactgtgatcgaggaataccagatctcatttgaaaaggctaaaaggaagctcagaggtttcattggttagaagaactgattttcacttatgcttctgattagtgtggcacttaatctta

SEQ ID NO: 4 - DNA, 341 bp, Gossypium hirsutum
  unsure (1)..(341): unsure at all n locations; Clone ID: LIB3493-042-P1-M1-H4
gcgagacgcagagttccaatttgatatcgactttgaggaaccagagttagacttaaacccgaaaatggctacagatgattttatgagcagagcaccattccaattgggaaacggatttgtaagtaatcattttccactttcaaagctggaggaatgcttcgaggaagacgaagaagaaagtgaagaagaaaccgagcagccatgtttttccactttcaaagctcttgaaaggatcccatccacttcaaagctttcaatgtcgttcaaaaataccagcttaggtgacaagagcccaaagtattcaaaattttctggaacaaagcaaganaaacggtacctta

SEQ ID NO: 5 - DNA, 192 bp, Gossypium hirsutum
  Clone ID: LIB3493-042-P1-M1-H5
cttaattctgtcggtgtttttatctgtacgcttcagttcgggtgttaggtggctccaggaacagcccaatgatgaccccaaaaacatggacgctattcctcccattgatgcactcaaccctaccgagttgaatggacccggtgttggcattcacgaagatcatgttgtcccaaaaggtgctgaaattggtac

SEQ ID NO: 6 - DNA, 355 bp, Gossypium hirsutum
  Clone ID: LIB3493-042-P1-M1-H7
tcgctaaagaatcctcttcaccatccccttatccatcgccaagtgtttcttcaccggcaccttctttaaattcaccaccaacaccaacttcaatttctttaacaaaggaatgggggggacttttcttttggttcaagggtgggaccatgcggtggccttttggaattttttgataatggcctaaaatccggcggtggggaaaatgaaaaggctgttggctgtcccggaactgaatactgtggccctagggattaccccattggggaggcccaagaaggactttgccttaagaacgctggagactatttgggaggagcagctaggaagcgaaaggtggttaaacacaaattaccat

SEQ ID NO: 7 - DNA, 300 bp, Gossypium hirsutum
  Clone ID: LIB3493-042-P1-M1-H8
ctctcattctttacccggaacacaaataaacactaagaacaagacaatggcagcaaaagctgagaagaagccagctgagaagaagccagctgtggagaagaagacggtagctgagaaagcccccgccgagaagaagccaaaggcaggcaaaaaggtttccaaggaagggggagctggggccggagacaagaagaagaagaggggccagaaagaggctgggaacctcaagaactacattttcaagggcttggagcaaggtcaccctggtatcgggattttaaggcaaggtttggggattat

SEQ ID NO: 8 - DNA, 261 bp, Gossypium hirsutum
  Clone ID: LIB3493-042-P1-M1-H9
ctcgtgccatttagtggtttaagggattttttcatttgtttcttcttacgctggattacctcacgaaaagagaaaatgaccaagtgttacccaactgtgagcgaggaataccagaagtcagttgaaaaggctaagaggaagctcagaggtcttattgctgagaagaactgtgctccactcatgcttcgtttagcgtggcactcaacttgaacttttgattgtaagaccaaaacaggaggttcattctgaaccatgaaacat

SEQ ID NO: 9 - DNA, 165 bp, Gossypium hirsutum
  unsure (1)..(165): unsure at all n locations; Clone ID: LIB3493-042-P1-M1-G6
ttcgggacgcgtggggatgattattgtgaagaaatggtgttttttnttnnnntggggggggtggttttatggatgggtggtgttttttatattttttattaattattattaatatatttatatataatatttattttattgatatttattttatatattatttat

SEQ ID NO: 10 - DNA, 123 bp, Gossypium hirsutum
  Clone ID: LIB3493-042-P1-M1-G8
tgaaagaaaagagtgataaacatggtgcctgacaacaataggaatgaggttgaggattataagttaactgtggaagttcctttaactggccatcaagttagcactgattcatggtttcagggc

SEQ ID NO: 11 - DNA, 132 bp, Gossypium hirsutum
  Clone ID: LIB3493-042-P1-M1-G9
atgaaatctctctgagagaggagttgcttaactgaattggttttggggggggggagcatggttttgatggaagattcacattttaatttcaaccgatttcctttgggtctaacttttcactctaattttgct

SEQ ID NO: 12 - DNA, 254 bp, Gossypium hirsutum
  Clone ID: LIB3493-042-P1-M1-H1
ataaccagcacctcaaagggctgtagaaatctgttgatatgtctgtaaatagtctcttatcttacatgatagtgtattcctattgccagttcagatgaatattcatggaaaagatctagagaattgcttctggatgttgctaggcgaggagaggaaagtggttatggagtgccttgcctactcattgcagcaaaggatgacttggacccctttccgatgtctctgcaaaactctgctagagttactcagcagtt

SEQ ID NO: 13 - DNA, 232 bp, Gossypium hirsutum
  Clone ID: LIB3493-042-P1-M1-H10
caaagaaatccgaggggttgatgatgttgatgaggagtttaaggacctaggggctgccagtgatgcctcgaagcttgttgatcacccttggaccaacttgttgcagaggaaatacaggcctcatctaaccatggccatcttaattcctttctttcaacaactaaccggcattaatgtcattatgttttatgcacctgtattgttcaacacaattgggtttggggacgatgct

SEQ ID NO: 14 - DNA, 303 bp, Gossypium hirsutum
  Clone ID: LIB3493-042-P1-M1-G10
ggaaacttgaattatggtaactcattccaggttcaatcagtcaatgtcatgagatgcacctttctcattgcctatgaaggattctaactctgtcgggatccctagttcatcaggtcatacaatgcctggcatgatgcaaatgatgcctaccggaaatagtgaacggtctgggacccagtctgtgaatcctggaaacttaccggttatgttcgggtacttgcctgttcaacttccactgttggataaagataatccctggggtatggtctctcaccctccgcaaatactgtcttttatgctgtg

SEQ ID NO: 15 - DNA, 80 bp, Gossypium hirsutum
  Clone ID: LIB3493-042-P1-M1-G11
ctggattacatcattaatgtctatttagtggctagagaattagtgatgtgtgagcctgttaagaatctttatgtggaaaa

SEQ ID NO: 16 - DNA, 250 bp, Gossypium hirsutum
  Clone ID: LIB3493-042-P1-M1-G12
aacaaaactattctttactctcaccttacttccccatctatttaggtgtgatgtatcttagttcttgactaattatccaatcacaccagcaaagtcttttctcaatgatctcatcaacctcaacctcaacgacaccactgaaaagatcatagccgaatacatatggatccggggatctggtatggatcttagaagcaaagcaaagactttgccttgaccattgaccgaccctttaaaacttccgaatatg

SEQ ID NO: 17 - DNA, 232 bp, Gossypium hirsutum
  Clone ID: LIB3493-042-P1-M1-G2
cttttcaaaaaaataaaaaacctcttgtaccgctcagctatcttagtttcttatcatggatttttctaaaaataaaaaaaaacaatcaaatgacatgaaccctaaaccagcagtatatgggtccgtaaaggatcacctgctagaaaaaccccaagaaaaaaaggtggaatatttgattttatggcgccttttaactcgtgaacatacggctgattctgattactcatgcatc

SEQ ID NO: 18 - DNA, 131 bp, Gossypium hirsutum
  Clone ID: LIB3493-042-P1-M1-F7
gtcaaaaggtgagaacatcagtccctagcttccaatatgcacctgaccatagagatagcttaaaaaatgcctatgattggacccaacaggagatttatgttctgttagagggttgggggaataggtttttg

SEQ ID NO: 19 - DNA, 310 bp, Gossypium hirsutum
  Clone ID: LIB3493-042-P1-M1-F8
cggacgcgtggggaagctaaaggagtagtgaagcacatattgttggcaaaggtcaaagatgaaatcccacctgagaagattgaggaactcataaaaggctatgccaatcttgttaatctcattcaccccatgaaagctttccactgggggaagggtgttagtattgagaacctgcatcaagggttcactcatgtgtttgaatccacatttgaaagcacagaggggattgctgagtatatagctcatcctgctcacgtggagttagctatctgtttcttcccatcttggacaaggttattgtatttttcta

SEQ ID NO: 20 - DNA, 152 bp, Gossypium hirsutum
  Clone ID: LIB3493-042-P1-M1-F9
tcgcccacgcgttcggcataatcagttaatcttcttttcgggccctcctaaagatgtgaaaaattgacaattacaatggttcatggcaccggcttaagcgtgctttcacaccaaggaaaggaacggggcttggcattggcaagggcttttca

SEQ ID NO: 21 - DNA, 90 bp, Gossypium hirsutum
  Clone ID: LIB3493-042-P1-M1-G1
tcttcacctatctctttcacaaaggagagcacagaaaaaaggggttcttgttcttgtggaagttattgatcaatggctaatgatgttgag

SEQ ID NO: 22 - DNA, 246 bp, Gossypium hirsutum
  Clone ID: LIB3493-042-P1-M1-F1
ccatttgattatgtgaaaacacaaatccagaaaatgcaacccgatgccgaggggaaatatccatacaacggttctctagactgcgctatgaaaaccctcaagtgcggcggaccgttgaaattttacaccggattccctgtatattgtgttagaattgctcctcacgtcatgatgactttgatttttctcaaccagattcagaaagcacagaaaaatatgggggtgtggatatctcaacaatggggg

SEQ ID NO: 23 - DNA, 451 bp, Gossypium hirsutum
  Clone ID: LIB3493-042-P1-M1-F11
caggaaggtgaatcaggttgctgacaaatattgggatctctattcaagtgagtcacttgagcgagacttgcctggacacctactccgctaccccatcggtgtttctagtgatggatctgtcactgaattgcctggcgccgagttcttccctgacacaaaggctcgtgttcttggtgccaaatctgattatctgccacctatcctcactacttaggggatctttactttgttcttaataacttgtctagtttggtgttactggctttggtagtaacaataaaacttgtttttgtgcttgtgtcatagtctgcagagctgcagtgttgtgttgctattgcttttccgtcatctgtgataccgtgttgtgattttagtgctgactggtataataaaacttgtagcctccgggtatatgttctgccgttattgttaattatttgctagtagtacc

SEQ ID NO: 24 - DNA, 291 bp, Gossypium hirsutum
  Clone ID: LIB3493-042-P1-M1-F12
cggacgcgtggggccaccatggcaagagcatgcctgccaaaactccgacttggcaccgccacagccgtctccgtttccaccttccttaagccactcagacatgggctccgatcattcggatcagcagctgcgttggagcttcctgacgaggatgtatactacgagtacgaacaagctcaccgggatcggcgctcagctcaaccgaagattgacgtggatgggtcaacgacagacaggggagtccaatgggtacttataggagagcctggggtcaaacgacatgcttatgct

SEQ ID NO: 25 - DNA, 216 bp, Gossypium hirsutum
  Clone ID: LIB3493-042-P1-M1-F4
gagagctcgaacccgggacaacaatttgttgggtaaattcgagctctctggcattccaccagcacccagaggcgttccccaaattacagtttgcttcgacattgatgctaatggtatcttgaatgtctctgctgaggacaagactactggccagaagaacacgatttcgatcacaaacgacaaggggtcgttgtctaaggaagaaatcgagaagat

SEQ ID NO: 26 - DNA, 228 bp, Gossypium hirsutum
  unsure (1)..(228): unsure at all n locations; Clone ID: LIB3493-042-P1-M1-F5
acgccacccatgaaggacacttangctgtcacgaatagtggaatccctattggcgagaggcacttcatccagacgagtctagacacctacttcaatgccccattgagatctccaagcatggatctgccactctattgcctggcgccgagtacttacataacacaaaggctgctattcttgcatccaaatctgattatctggcacctatcctcactacttaggggatct

SEQ ID NO: 27 - DNA, 62 bp, Gossypium hirsutum
  unsure (1)..(62): unsure at all n locations; Clone ID: LIB3493-042-P1-M1-E11
cttnccttcaattccagcaaccccaaaatggcccttgcaggcctgctgctgagtgcaacccc

SEQ ID NO: 28 - DNA, 192 bp, Gossypium hirsutum
  Clone ID: LIB3493-042-P1-M1-E6
ctgccggtaccgggctccaattcccaattccacccacgcctcacggtgtgagctaacatgttcacacagaggccaccaaatgggaccgcaggtcatgactcaaggagacagccaacactagtttgaaccaccaccgtctccatttttcgagcctggcgagataacctcatggtccttttatagggctgggat

SEQ ID NO: 29 - DNA, 262 bp, Gossypium hirsutum
  unsure (1)..(262): unsure at all n locations; Clone ID: LIB3493-042-P1-M1-E7
gaaacagagagagagagtatgaatcgccaccacgatccaaaccctttcgatgaagaagaagtcaatccattttccaatggggggtttgtcngacctgcacgaccactggcattcaaacctttgggttttgggcagaaacatgaagctacttgggatatacctctggattcaatgaatgattcttagaaaagagaaaaagaactcgcagcttgggaagctggtttttaaaaaaggggaaaggatttttagagaagagaagatg

SEQ ID NO: 30 - DNA, 217 bp, Gossypium hirsutum
  Clone ID: LIB3493-042-P1-M1-E8
aaaatagagagatggcgtctgtaataaaatctgcaatcttaattctggcggtggttttatctgtacccttcaattccggtgttaagtttcttcaagaacaacccaatgatgaccccaaaaacattgaccctatttcttccaatgatgcactcaaaccttaccaggttgattgaccccggggttgcatttaacaaaaataattttttccaaaaaggtg

SEQ ID NO: 31 - DNA, 287 bp, Gossypium hirsutum
  unsure (1)..(287): unsure at all n locations; Clone ID: LIB3493-042-P1-M1-D7
caagtgttcgtgaggaccagcgcattcttcaaagtggtgttcatgttgttgtgggaactcctggtcgtgtctttgacatgttgaggaggcagtcactccgcccagattatattaagatgtttgttttggatgaggctgatgaaatgctttctcgtggttttaaggatcagatctacgatatcttccagctgctgccagccaagattcaagtgggagtattttctgccacaatgccccctgaagcccttgagataactaggaagtntatgaacaaaccatagagaatt

SEQ ID NO: 32 - DNA, 153 bp, Gossypium hirsutum
  Clone ID: LIB3493-042-P1-M1-D9
cggacgcgtgggaaacgatgaatctccccgcaaaatgcaccaaaggggttaagacaatgagggagattgagggaacccttttcccaaatcatgaaacctcaatcccaaaacctaacaaagtaaactaactcacggtgggtcaagccaacacca

SEQ ID NO: 33 - DNA, 274 bp, Gossypium hirsutum
  Clone ID: LIB3493-042-P1-M1-E1
acgaaactcaaaatcaagcttcggcgataaccgtaacttaaaaccctaaatggatcttctcaaagaagagcttctcaagaagcggcaaagcttagctcaggaaaccggcggcaggcgcgtatttaaacgctccgagattgagcagaagcaaatccagaagcttcgcgagcaagaaaaacgcgaactcgaagctaaatctcgccgtcaatcgaacgcctcttcctccgctgcgaacgacgcttccgctaaatccaatccttccgcttccagtact

SEQ ID NO: 34 - DNA, 212 bp, Gossypium hirsutum
  Clone ID: LIB3493-042-P1-M1-E10
cggacgcgtgggttcctccacagctgcttcaattttcgggttcgggttcgggtgtatggtgacttcaacaatggtgtggttgaagaattgtatggcacaccattaaccactactgttacgacaccgacttcaacgagcactccgtttgaatcctgcaatatctcgccttgtgactcgtgttatgttagtggagagcttaacccggatgagta

SEQ ID NO: 35 - DNA, 221 bp, Gossypium hirsutum
  Clone ID: LIB3493-042-P1-M1-D12
gttttcttccttttttcttttttttttattgtctggaaaatcttcataaccattctatgggtatttataagattttgatattggtaagtaaatgacgcctattttataaggacttggtcttatcctgatctaattgattaaagggaagaatctcatgtgccattttggggttctggtttcaaaatgaaggaaaattggttttcagtacctctggctggtag

SEQ ID NO: 36 - DNA, 238 bp, Gossypium hirsutum
  unsure (1)..(238): unsure at all n locations; Clone ID: LIB3493-042-P1-M1-D2
nncgaacaaactggtagcctatacactgattgggatctcctcccaccaaagaagatcaaagatcctgagggccaaaagcctggaaattgggatgacaaggaatacatccctgatcctggagacaaaaaggcagagggttatgatgacatttcaaaagagatttctgatcccgatgctaaaaagcctgaagatttggatgatgaagaaaatggtgaatggacaccctcaacaatttcca

SEQ ID NO: 37 - DNA, 349 bp, Gossypium hirsutum
  Clone ID: LIB3493-042-P1-M1-D3
gttccatgtgaacggcacttgcacatgggttagtcgatcctaagagacgggggaagcccgttcgacagcgcgttcagcgcgagcttctaaagggaatcgggttaaaatttctgaaccgggacgcaacggctgacggcaacgttagggagttcggagacgtctgcgggggcctcgtgaagagttatcttttctgtttaacgtgcctcacaccctggtaaccggtctctcgtgattttgttttatattgttctctaatattcactttttatatcttagtaaaatatttatttcttctattctttaccttttatacttttcactattaaacttctctcttaattatttttac

SEQ ID NO: 38 - DNA, 225 bp, Gossypium hirsutum
  Clone ID: LIB3493-042-P1-M1-D5
ctggctcttcaactccttgtcacatgtgggaaaacaccccctcctggttacacgttgcgtctcttctaaaaccaaggttgctaggttgatggaatggacatgagaggatgtcgagcttttctctttgtttcttagttggattggaaatctgatgcagtgtttattgtaacaccaattaattttttttcttttaatagattgttgcaacttgaatgtgtgttttta

SEQ ID NO: 39 - DNA, 393 bp, Gossypium hirsutum
  Clone ID: LIB3493-042-P1-M1-C8
atgaacctgagtttgattatttgaagagcctggagattgaagagaagatcaacaaactcaaatggtgtacaagtctaagtgggtcactctttatcctttccacgaatgataagacaattaaactgtggaaggtaaaggatagaaaggtgaagaaagccagggaaatagattctcctcatcaattgctctcttcagaaaatactcttctgtctgaaaggagttctatgaatgagcaaggcataccgtcttttgctaatggcaatcacgtagaaagtggagctgacagtattttcccatcttaagaaccgcgttctaagattgccaactttgaagacactgcttatgcaagatgtagaagggtgatgctcatgctcatgattttaatatcaactc

SEQ ID NO: 40 - DNA, 290 bp, Gossypium hirsutum
  Clone ID: LIB3493-042-P1-M1-C9
aaaagagagatggcgtctgtaataaaatctgcaatcttaattctgtcggtgtggttatctgtacgcttcagttcgggtgttaggttgctccaggaacagcccaatgatgaccccaaaaacatggacgctattcctcccattgatgcactcaaccctaccgagttgaatggacccggtgttggcattcacgaagatcatgttgtcccaaaaggtgctgaaattggtactcttgggtttggttttgaaggtgggcctgataaatggtggtcttttggatggttcggttattg

SEQ ID NO: 41 - DNA, 330 bp, Gossypium hirsutum
  unsure (1)..(330): unsure at all n locations; Clone ID: LIB3493-042-P1-M1-D1
cgaaccgggaaaagcccagcttgagaatcggtcgccatcggcgtccgaattgtagtcgtggagaagcgtnctcagcgacggaccgggcccaagtcccctggaaaggggcgccggagagggtgagagccccgtcgtgcccggaccctgtcgcaccaagaggcgctgtctacgagtcgggttgtttgggaatgcagccctaatcgggcggtaaattccgttcaaggctaaatacgggcgagagaccgatagcgaacaagtacccaaggggaagaagaaaggagcgacctttaccatcgactgtgctaagncggttgaagatagatcatggca

SEQ ID NO: 42 - DNA, 267 bp, Gossypium hirsutum
  unsure (1)..(267): unsure at all n locations; Clone ID: LIB3493-042-P1-M1-D10
cccacgcgtncgaatgatatgcccgcagaaggtgagtttatccaggcagctgcactagtgagccaacctgctctttattccaaggagcttatggatcagcatcctgttggaccagcaatggttcatccagctgaaactgcctcaaaaggaccagtttggactgctctccttgacccgggagtcaaacgtgctttattagttgggattgggattcaaattctttagcagttttccggcattaatggagttctctactacactcctcaa

SEQ ID NO: 43 - DNA, 410 bp, Gossypium hirsutum
  Clone ID: LIB3493-042-P1-M1-D11
gttactgttatcgatttcttgaacaacatgggacattgcaacttcgagttcgttcccaaatggttctacaccatcttccctcctctcaaatatatcatttacaccccttcgtttcactctctgcatcacacccagtttcggacaaattacactcttttctgtccactctatgattatgtctacggcacggtggacaaatcaacagatagtgtgtatgaaaacgcactaaaaagagaggcagagtcaccggacgtggttcatctctctcatttaaccacacccgactccatttaccatctaccccttgggttcccttcgtttgcctccaagccccaagttttcaaatgggtccttctttttatgtggcccgtcacgtgttggtctatgctcttaacttgttttgtagccat

SEQ ID NO: 44 - DNA, 167 bp, Gossypium hirsutum
  Clone ID: LIB3493-042-P1-M1-C11
gttgaaggtttcacatttggagtaaaggaaagagttttcttatttccttgtggggaagccatggtgtgttactgattcttagaagcgtattttttctgggtcggggaattgagagagaaagtgaaagaaaaggttgaagcttaagctacagttgggttgcttggtgg

SEQ ID NO: 45 - DNA, 112 bp, Gossypium hirsutum
  Clone ID: LIB3493-042-P1-M1-C12
gtgattctttctttttcttgtggtctccagagcttctctgttacatcgtttattttctctcaagaactgaagaaaaaattcgaatagatttaaacttaagaaagatcaaaag

SEQ ID NO: 46 - DNA, 326 bp, Gossypium hirsutum
  Clone ID: LIB3493-042-P1-M1-C2
tcgattccaccacctgctgcatgccctccaccaccagcaaagcctgcttcttgccctaaggacacattgaagctaggtgtttgtgctgacctgcttggactggtaaacatagtggtgggagcacctccttcgagcaaatgctgtgctttgctccaaggcttggctgatttagaggctgccctttgcctttgcaccgccattaaagccaatgtgcttggggccaacctcaacattcctattacccttagcttactccttagtgcatgtgagaaggaaatcccttcaggcttcaaatgttgatattttttttaagaagcacaatcagt

SEQ ID NO: 47 - DNA, 296 bp, Gossypium hirsutum
  Clone ID: LIB3493-042-P1-M1-C3
ctgctgttgaaatcatgcgactacagcatattattattcttcaaaacaagggtgatcgtattcaagagaatgtggccatcaatcagcatgaagcaattcagaaatttattcagggtactgttgctgatggtgcacccgtggtaccaatctctgcacaactaaaatataatattgatgttgtgtgcgagtacattgtgaagaagatccctattcccgagaggaactttgtctcaccctctaacatgattgtaatccgatcttttgatgtcaataagccagggtttgaggtttgttga

SEQ ID NO: 48 - DNA, 207 bp, Gossypium hirsutum
  Clone ID: LIB3493-042-P1-M1-B8
gaaacaagaacgaaaaagctatgagcaacggagctgatgctgtgagacagtgactgttccaagaagcagacaagtatttgtagcacatatcgggaaagctatcacgtggccatggatgcttaaaagctttggccttcttggtcgttgcatttgctgtaggtgctgctgttgtaactcccaacatcgacccctcggactggagcaaac

SEQ ID NO: 49 - DNA, 286 bp, Gossypium hirsutum
  Clone ID: LIB3493-042-P1-M1-B9
gtgcgacccaatattcactctttaagacatacatgctgtcatacgcgttggcgcggctacacgcatcctatctggtcacgtacttgttaggtagaccactgtccaaggacctaatttgacattcaatccaaatttaggggttgacatgtggactgcaaaccacgctggtgtagtaagttgagatctaccctatctacttctcaaacaagggtcagcaaatccacttggtctctaaacccattgctattattagtcacccaatttccaacaccaacgattctcattc

SEQ ID NO: 50 - DNA, 211 bp, Gossypium hirsutum
  unsure (1)..(211): unsure at all n locations; Clone ID: LIB3493-042-P1-M1-C1
tcggngcacattaacttgcccaccacctttacttgagtctgttgatgcttttatccagtggcgcacctccaaccagtggactggagtccgatagtctttctccccgtaatagtggcctgctggatgctttacttcatgaggcaaaaactctaagcagtgcaaagaatcatgcatctgacaaaagttcaaattcatctacccccggtgatat

SEQ ID NO: 51 - DNA, 122 bp, Gossypium hirsutum
  unsure (1)..(122): unsure at all n locations; Clone ID: LIB3493-042-P1-M1-C10
tgttcgtattcctntttctatccattcgtacgtttaaatatgtttttttttaataaatgttttttttttttctggggggggtttttttaagagggggtttttacactttttttatttagaat

SEQ ID NO: 52 - DNA, 322 bp, Gossypium hirsutum
  Clone ID: LIB3493-042-P1-M1-B2
tgcaatagcatttggaactcttgcggccgatgctgcttctacaagtaatggcgtttccgattgataatgatgattctgatttggatcgtccaactgaaggttttgcttccatccttgaggcaatcgaggacattcgccagggcaagatggtattggttgtagatgatgaagacagagagaatgaaggagatcttataatggcagctgagttggcgacaccggaagcaatggcctttattgtgaagcatggaactgggatcgtttgtgtgagcattctagaggaagatctggagaggttgcattttcctttgatggccaacca

SEQ ID NO: 53 - DNA, 426 bp, Gossypium hirsutum
  Clone ID: LIB3493-042-P1-M1-B3
cggacgcgtggggaagctaaaggagtagtgaagcacatattgttggcaaaggtcaaagatgaaatcccacctgagaagattgaggaactcataaaaggctatgccaatcttgttaatctcattcaccccatgaaagctttccactgggggaagggtgttagtattgagaacctgcatcaagggttcactcatgtgtttgaatccacatttgaaagcacagaggggattgctgagtatatagctcatcctgctcacgtggagtttgcaaatctgtttctccccagcttggacaaggtcattgtatttgactacaaacccaccgttgtacgttgctaagttacaagcataagtccgtctcaatgtagctttgtcctgctcatgtctgttgtattttgaataaagtgtgcgttttgtctatgaaagccc

SEQ ID NO: 54 - DNA, 154 bp, Gossypium hirsutum
  Clone ID: LIB3493-042-P1-M1-B4
ctcctttttttttcttcttctttttggggttattggacaagtgggtgcatttgagggggtttttaattagttcacctgctcttgtttcttgggaatggccacattgggggctttcttttgagatctgagatttttttttaaagaactgtgattt

SEQ ID NO: 55 - DNA, 276 bp, Gossypium hirsutum
  Clone ID: LIB3493-042-P1-M1-B6
cggctttttagaaataataaaaaaagttctcatttctgtttttgcacgctttctctcccttctgcgaaccccataaaaaaatggcgacatcttctagacgaacgagcggtccggttctccgatccctctccccatccggccgtttctgttctcactacgcttctcagtcttcatcttcttcctcttcttttgccttgtcgagttcaagcttttcttcacgctcttcaactttctttaatcaacacagatctatctctccgccacgtgtcaatatgt

SEQ ID NO: 56 - DNA, 317 bp, Gossypium hirsutum
  Clone ID: LIB3493-042-P1-M1-B7
aaaagagagccgggaaaggaagctagaagagcaaagcgaaaatgaagactatactttcctccgagacaatggacatccccgatggggttagcattaaggtcaaggctaaggtgatcgaggttgaaggtccaaggggtaagcttacccgcaacttcaagcacctcaaccttgatttccatctcatcaaggacgaagagaccggcaagcgtaagctcaggatcgaggcttggtttggcttcaggaagaccagcgccgtcattcgtacaggtcttaatcactgtgagaaccttattaccggtgttactaaaggataccgt

SEQ ID NO: 57 - DNA, 330 bp, Gossypium hirsutum
  Clone ID: LIB3493-042-P1-M1-A9
agagtgtagcaattggtatagctgcagccaaagcttctgttgagggggacaggaatgtacctttttaatttaatttgccaacaattacaagggatgcccggattggttatttaaatggccaacttttggaacattaatctaaactgtaatgttccaaaaaaggggattgggtttttgttaacaccccaaggtagagctatatttgccttggctcttttattggtatacaaaaaaaaaccttggaaatgggaattgaggttttattcaccatattttgcgaaaaaattagaatgcagccctatttttttgtgggatgaatatattttggtt

SEQ ID NO: 58 - DNA, 446 bp, Gossypium hirsutum
  unsure (1)..(446): unsure at all n locations; Clone ID: LIB3493-042-P1-M1-B1
cccacgcgtccgctttgaatccacacccacgtctctgccatggacaccaaaaacaaggatgttattcgattagagcgtgaatccgtcatccccatcctaaagcccaagctcatcatgactttagccaacctaattgaacatagttctgatcgggccgagtttttaaagttctgcaagagagttgagtacacgatacgagcttggtatcttctccaatttgaggatttaatgcaattatactccctcttcgaccctgtacatggggctcagaaattgcagcagcaaaatttatcttctgaagaagtagatgtacttgaacagaatttcttgacatatttatttcaggtgatggagaagagntaatttaagattgctacagatgaggagaatgatgtcgcacttgcagggcaatatcttcttaaccttcccataatagttgatgaatc

SEQ ID NO: 59 - DNA, 359 bp, Gossypium hirsutum
  Clone ID: LIB3493-042-P1-M1-B11
cactactttaatcattgctgattggaaaggtatcgccggtgagatcccatcatgcttggcgtcgttgcccaacttgagagtcttggatctcatcggaaattccttatcgggaaaaatcccagaccagatagggaaccttcaaaagctcaccgtcttaaacttagctgataataaaatcaacggcgaaatcccaagctccattgttcaactttccagtttaaaacacctcgatttaagcaacaacctcctcaccggggaagtcccggccaactttggcaacctgaaaatgctgagccgtgcattactgagtggaaaccaactcactggaacgatcccaatctccatcagcaacatgtacc

SEQ ID NO: 60 - DNA, 127 bp, Gossypium hirsutum
  Clone ID: LIB3493-042-P1-M1-B12
cttttgagactgagagatgtacggatattggtaaaatgtttcaaggtgatgagatagtagacttgattttcgccgtatatattcctaaatttcatgccgagaaattagttgggttatttaggttctt

SEQ ID NO: 61 - DNA, 339 bp, Gossypium hirsutum
  Clone ID: LIB3493-042-P1-M1-A5
gattcttttttcgccatttcttttgcatgttgatgatctttggtggctttaactcggtacttggactcacttcaaactcacttccgctaatacttcttcgggtttcacatggctagtaaccccaacgaggcttccgctgatgatttcctcgagcaaatcctcggattccctaacttcgcgccttctgagacgggtttggcgggacccgacggtggactggcaggaacaactgctggtgccggaacgccaatgtttctacaactcagctctggcgatggagccagtcatctcggcggaatcggcggcggtggaggcggcgccgtttcctgtcaggttttt

SEQ ID NO: 62 - DNA, 241 bp, Gossypium hirsutum
  Clone ID: LIB3493-042-P1-M1-A6
gtatgcaagacaagtgctcgtttgttggaacttacaaagagcttaagaaacatgttaggacaaagcacccactggcacgacctcgagcagtagatcctgtacgtgaagaaaaatggaaaaagcttgaaaacgagagagagcgaaatgatgtgatcagtacaattatgcatcaacaccaggagcaatgggttggtgattatggatgatcggcttatgatttatgcgtgattggtaatgattt

SEQ ID NO: 63 - DNA, 172 bp, Gossypium hirsutum
  Clone ID: LIB3493-042-P1-M1-A7
gctttcgtcattggaagctatgtcatttggacagctattgccggggctagatactccattgagcacattaaaacaaaaagggcggcagttctatttggcccaaattccaaagggagtggccttggtggttaaaagtttcaagctggtatcaaaaagggattttggcaattcc

SEQ ID NO: 64 - DNA, 68 bp, Gossypium hirsutum
  Clone ID: LIB3493-042-P1-M1-A8
tcggccagcacagcttttatcaactaatccatcagggacgtgtaattccatgtgatttcattggtatt

SEQ ID NO: 65 - DNA, 313 bp, Gossypium hirsutum
  Clone ID: LIB3493-042-P1-M1-A10
tcgcacgtttcattgactaatttggctgataaaatcattcatctgagtggtttaaaattttgatttgggcttaatcaatctctggtttttctcgggttcagctggcatggctaccgaccctttaccccaaattccaatgagggcccggtcaaagagcttaaaccattcgatacaccccagggatgtgggaaccccacctgtttgggcttccacacccatccttttccggggaattaagccttttcaggaatggataccctgggtgggttccggctttggtggtggttacaccggtatggttattattaccctg

SEQ ID NO: 66 - DNA, 300 bp, Gossypium hirsutum
  Clone ID: LIB3493-042-P1-M1-A11
gcggtagcagaggttgaaaaccatctccattttcatcgcctgtaactagtttccttaatatgcctagaaattacaagaattagaatagcttcttgctattggaattggcatttgctgctataggattattaatcgcttgagatagcaagcctattcatttgatgtgaaggattaaaaggaaactgtgagttacgagtattaatgcggattttacttctttcctattattctcactctcaatattggtgatgcctgctggccgatgtatacgaacaaaaacggaaatacaattggattctt

SEQ ID NO: 67 - DNA, 299 bp, Gossypium hirsutum
  Clone ID: LIB3493-042-P1-M1-A12
ggaaacgaaaagaaaaagtgattggccaccatgtttcgctcaatcaactttatagccatgctggtgttccttaattttagtcgggatattacagaaactgcagcagcatcaccattgtgcgatgtgggtatcttttacttaagcccctgcgagggcttcataaaaggcggagccgatccggcaccggaatgttgtgttggtgctaaacgtcttattaacgaactaaaggccaaagaagataggatagaactatgcctgtgcttgaaagcaatattgccactacttgggccatttgaccc

SEQ ID NO: 68 - DNA, 198 bp, Gossypium hirsutum
  Clone ID: LIB3493-042-P1-M1-A3
tcgcgagaggagccattggtgccagaagatatgtggtactgccctcaatgcaaggaacaacgacaagcgagttaaaagcttgacctgtggaggctttctgagggtctagatattcatctaaaaagattctcatatatccggtcaatgaagcataaagtggaaacttttgtgaacttttctattcaagagtttgactta

SEQ ID NO: 69 - DNA, 236 bp, Gossypium hirsutum
  unsure (1)..(236): unsure at all n locations; Clone ID: LIB3493-042-P1-M1-A4
ccgcagcttctctttactctgtaatggcgaagtcaaagaatcacacggctcacaaccaatcttacaaggctcacaagaatggaatcaagaaacccaagaggcaccgccacacttncaccaaagggatggatcctaagttcttgaggaaccaaaggtatgcaaggaaacacaacaagaagaatggagaatcagccaatgaagaagagtatggctttagtggggtaaaataaaattct

SEQ ID NO: 70 - DNA, 469 bp, Gossypium hirsutum
  Clone ID: LIB3493-026-P1-M1-H7
cggacgcgtgggttggtgagcaaggctctcagttgagctcttttgatcctatgcatcatgtccaagaatctgtatcccatgtagctgaaattgttgaaagttcaagaaggaaagctcgatcaatggttgatgcagccttaaaggctatgtcatctttgagaaaaggggggaaaaacattgagaggattgaggatgcaatagattttgtaaataaccagctttcattgaatgagtttagtgcacctgctccgaggtctgcggccccagtagactctgtccgtagtcatgataatctgactgcttgttcatcatatccatttgcaactagtcatatacctgagatgaagctgcaaaatttgtcagaccaagatgaacttaaaatcccttcagaccttatttcgcaatgtgtagccaccttgctcatgatacagaaatgtacagaaagacagttcccaccaagagatgttgc

SEQ ID NO: 71 - DNA, 458 bp, Gossypium hirsutum
  Clone ID: LIB3493-026-P1-M1-H8
cccacgcgtccgcttagagctaaatttctagctttagttatagaaaaaaaacagtggaattaagggtactatggcatttgagaaagatctcaaccttgatgccaccgagctccggctaggcttaccaggatcctccgacgagtcagctaagaaccaaacgccagcaactcttcggagcaacaacaaaagagccttgcctgaagaatctatgtctagtaatgccacagcttccaaaaactgtgaccaagaaactgctccactccccaaggcacaagtggtagggtggccaccgatcagatcttacagaaaaaacaacttgcaacctaagaaaagtgagggtgaaattagtgggatatatggtgaagtgagcatggacggggctccttatcttagaaagatagattttgaggtgtttaaagggtacccagaattgctttagggcttggaagagatgttaa

SEQ ID NO: 72 - DNA, 416 bp, Gossypium hirsutum
  Clone ID: LIB3493-026-P1-M1-H9
gacggagagcatgtttttggtgttgcccacatttttgcatcttttaatgacactttcattgtaagttacatggtctttgaattcttttacttggtaacacatatttcttgctatttcgatatgatttttttaagctgtgaattttaatcggttttatttttttcttttggtattttgacaatgatagcatgtgactgatttgtctggaagagagactatggttcgtattacaggtacaatattgggattgcattaacatatcatttagctgccaatttttatattctagtggaaagggattgtttgaaatgtctataaataataacaaaaattgaacgttggacttgtgttactctaacttgggtttgaatttgaatagagcatgttttgacacaagtatatttgtatataaaagt

SEQ ID NO: 73 - DNA, 122 bp, Gossypium hirsutum
  unsure (1)..(122): unsure at all n locations; Clone ID: LIB3493-042-P1-M1-A1
cccacgcgtncgaaatcaagngttttgcacttttcgtttataagacagcagaaggggctcatgcagcgttagcggagcctgtaaagaacattgatgggagacaaatgaattgaagctggcta

SEQ ID NO: 74 - DNA, 396 bp, Gossypium hirsutum
  Clone ID: LIB3493-026-P1-M1-H3
caaatggtggaaaaaaaatacataagcaaactaaaaggtgttcaacttctctgcagggtcaggtattgtaattttgcattgttttggggttggggggcgggttgagaatgtcaaaataatattgaaaacttgttgcgattaagcggatgcgactggatcaaagtttcttacatgatgaaactagatttatttgttcgccggcaatcgtaaatctgtctctgcaaattggacattatagctattcttttgcaaataaacacttgtgaaagactatccatgtgttgaaatatgcttcatattaagaggtcaagaataaaactaaggatttaggcgtaagggttaatgttattattctatttgtcatcattattatgcacaattaggattggttgcttt

SEQ ID NO: 75 - DNA, 379 bp, Gossypium hirsutum
  Clone ID: LIB3493-026-P1-M1-H4
agttatacaaagctcaagaggagcttatcaatgttgctaaggaatttggtgtgaagctaacgatgttccatggtcgtggtggaactgttggaagaggtggtggtcccacccatcttgctatattatctcaaccaccagaaacaattcacggctcacttcgggttacagttcaaggtgaagttattgagcaatcgtttggagaggaacacttgtgctttagaacactccagcgttttactgctgccacacttgagcatggcatgcacccaccagtttcaccaaaaccagaatggcgtgcactgatggatgaaatggctgtccgtgctactgaggagtaccgttccattgtcttcaaagaacctcgatttggtgaatattt

SEQ ID NO: 76 - DNA, 437 bp, Gossypium hirsutum
  unsure (1)..(437): unsure at all n locations; Clone ID: LIB3493-026-P1-M1-H5
actcgtccacacatgcacttgagcgaaaatgaaggcatcgaaggcaacaccttcgtggtcaccggtggtctgactattctcagctctcccctttgcttggagctaattcgcagaggtgctcgccaagatcgctcctttgaccttcgtcattattacccttggtccctccaactgaccaaccacggcgtccgctgcctccaaggcgatcttacctcgaagcaaccatttggcatatcctattgtggcgccatttgcgtgattgacctggctttctacggcatgttagggaaagaaatgcttcagttctctcgtgttgaccaggtgaatatcaatggaacctgccatgtcttggaggcttgccttgaatttgggatcactaggcttggttatgnaagcacatataatgttgtgtttggtggaaaggagattgtaatggc

SEQ ID NO: 77 - DNA, 317 bp, Gossypium hirsutum
  Clone ID: LIB3493-026-P1-M1-H6
tggacgcttggaccaggaactaccactaatcatacacatttcacagccacatatatgaccagactcgtgtacgcggcttgacattttaggaaaggaccattgaagaactcgagtggcaaatgcattacttctctataacaatagttattaccagagcaactggtttcgcaacaggatcatacagtggttggtataagattctaacatttaccatgacagatgcctgggatgttgattgcgcgaatctcaagtctgctttctttctagatcgaaaacttatacaagcttcaacttatgtaaccgagttagaccttata

SEQ ID NO: 78 - DNA, 509 bp, Gossypium hirsutum
  unsure (1)..(509): unsure at all n locations; Clone ID: LIB3493-026-P1-M1-H1
attagggagtggctctttttcgataagcctcgaagagcatttgaaagtgggaacagaaagcagaggtctttgccggattacaatgggcgtggctggcacgagtcgagaaagcaagtcatgaaatgaattcggaggactgaagagatcatactacatggatccacagccactaaaccattttgagtggcatctttacgaatacgagatcaataaatgtgatgcttgtgccttgtatcggttggaattgaagcttgttgatggaaagaaaagtgcgaagggaaaaccagtgaaggatacagtttcctatccgcataaacatatgggaaagctccccgacgggttcccttctgaaaataactgctgtgtcaaaggaaggacaaaggttaatgcttaanaatgggtggtgggaattttttttccactccaaatgcagtggtaccaacgaggtgagaagttcgagtacgggccgagtgtgcagtatgactatgtgggcagctattatctaacat

SEQ ID NO: 79 - DNA, 412 bp, Gossypium hirsutum
  Clone ID: LIB3493-026-P1-M1-H10
ctttcactaatcgctgaacctcagcggagctcacatcaacacaatagccaaaatggcatctccaacttctgctttaaccaattccccgttttgcccccatcttctcccccaattctctcctctacccgtcctctccttcactcacagcctcaaatctatcccaccaaagctcaagtctctgatttccctcaaaagagacaaccacccctcaaccttaaccgtcaaagcccagaccttggacttctccggttcattctttgagggtggcttcggctctgatgatgacccgccttcccaacccggctctggcataaccgccttggaggataaagaggaaccccaatgcccaccgggcctccgacagtacgagacaatggccgtcttgagacccgacatgtctgaagatgaaagg

SEQ ID NO: 80 - DNA, 430 bp, Gossypium hirsutum
  Clone ID: LIB3493-026-P1-M1-H11
gcagctgacgcgtgggtcggggcataccccgcgccacgaaaacgagaagcccatgtttgaactagtctcagcagcccaaacggtcttgccagatagtgatggtgcgattgatggtcaccttcgtgaagttggtcttacatttcaccttcttaaggatgttccggggcttatttcgaagaatatagaaaagagcctggtagaagcatttcaaccattgggcatatccgattggaactcccttttttggattgctcatcctggtggtccagcaatattagatcaagtagaagccaaattagcactgaagccagagaagctacgagccacaaggcacgttctttcagagtatggtaacatgtcaagtgcttgtgttctatttattttggatgagatgaggaagaaatcaagggaagatgggctttagaccaca

SEQ ID NO: 81 - DNA, 351 bp, Gossypium hirsutum
  Clone ID: LIB3493-026-P1-M1-H12
gcgtggacgcttggatctggaactaccacgacttgcacacatttctaagcgccgtgatgaccaaccagtatacgtgtcttgatgggttcgcacgtagcaaaggaaatgttaggaacattatcaaaaagggtcttcacaacatcactcatcacgtgagcaactctctcgtaatgctcaaaaaagtccccggtgtcaacaaatccaaatccgagtattttcctcaacagggacgcttgaaaaacgggttcccttcgtggttatcccgcaaagatcgaaaacttctacaggcttcagttaatgaaaccgagttcgacctcatagttgccaaggatggcactgggaacttcacta

SEQ ID NO: 82 - DNA, 409 bp, Gossypium hirsutum
  Clone ID: LIB3493-026-P1-M1-H2
aaggaagtgaaggaaatcagattgcagcttttcagggaccatttccttgaggagaggaagaagcttgcaagcacaaaaagaactgacaacaatgctttgaaatgtgccattgatcacattcttgatgctcaacggaagggagagatcaatgaagacaatgttctttacattgttgagaatatcaatgttgctgctattgaaacaaccttatggtcaattgaatggggcattgctgagcttgtgaaccatcctgagatccagcagaaactccgcaacgaaatcgacaccgtcctaagaccccggcgtgcaggttaccgaacccgacacccataagctttcatatctgcaggcagtgatcaaggagactctcaggctccgaatggccatccctctactagtcccacacatg

SEQ ID NO: 83 - DNA, 449 bp, Gossypium hirsutum
  Clone ID: LIB3493-026-P1-M1-G6
ccaggatccagttcaaggctgatggagagggcaagttccacactttccatcctgtggctacaatcctcagttacctcaccaaagcccctcttgttccaccaggcacaccggtggtgaacgcactgtccaagcagcgtgcaatgctggagaacatactaagggccagcattggcttggctcctgaaaacaacatgattttggaatacaagtgaaaaagttgagagaaaagtggaacaaagctttggttcttagaactttaggaccattttccctttctctgtcgatttcataaaagctgtggttactggtgtcacagaatgtaacggatgtatgatggtcatgctatgcttattatttgtcatttattttcaagtggtcctcatgtttgtagttaactcttgatccaagcacctttttttgggaaacaggtgtgttagtgtgaatttttc

SEQ ID NO: 84 - DNA, 371 bp, Gossypium hirsutum
  Clone ID: LIB3493-026-P1-M1-G7
aaaggccaccggcatggcgggttcacaatccctcgttggctacaagaactccaccaccggcaccgtccaggttcatacctatgacatcagctcctacagttcaattgttgccaaggatctgtccttcgaggtctgggataagacggctgagagtagaagggacgggagtttggcgattttcgctaaaattaaggttccggcggatttagcggcgagtgggaagattaatcaggtttggcaagtgggtcccagcgtcggaactgatggcaggttggacaaacatgccttcgccgtctctaatttgcaatctaaaggaaccttggatttgaaaagtggacagagtagcactagttctggaggagacgataggc

SEQ ID NO: 85 - DNA, 438 bp, Gossypium hirsutum
  Clone ID: LIB3493-026-P1-M1-G8
gaaaacagagggtctttaccctctctccctctctctgctcatttcggctagggttcttagaaccttcatcgccgccttcaccgcagcgccaccacaggcggtggttgcggtgtaaaccgggctttcaagcccctgtttaaggcgaactcaatagcgaaaacttcctcgaccaaagaagatccaaagaaggaaccccctacgacctcttcgggtcgaatccgacgacggaggagcgatatccgacgacggtcacttcgattcgggtaagtccccttctttgattttataccctttttgttttttagatttgtagtataaataaaaagaaatttaaagagatgaaagaacgaaatccaaatcaaagaaaaaaaattaatcagagatcaacccttaaattttggtctggtctttgattcaaatgtgcgtgtgccctcgtta

SEQ ID NO: 86 - DNA, 445 bp, Gossypium hirsutum
  Clone ID: LIB3493-026-P1-M1-G9
cggacgcgtggggctggcttctcattttctctctttcctcacttccttactttgattaccctttttatatatcacaaaaattttgcagtctttctttcagacgcaagcagcaggcacctgtcctagaaacagagatcttctcaagttagttaaataacggtttttgctatccccattttgccctttcattcttcttcttctccttcatcggaagatgattagttggaacgatctttacaccgttttaacaggggggaatcccactgtacgttgctatgatcttggcttacggctccgtccgttggtgggaaaaattcacccccgaccagtgctcgggtatcaaccgctttgtcgccatatttgccgttcctctcttgtctttccacttcatttccaccaatgacccttatgccatgaacttcaggttcgtagcagccgacaccct

SEQ ID NO: 87 - DNA, 490 bp, Gossypium hirsutum
  Clone ID: LIB3493-026-P1-M1-G2
gaaaaggccaagaaggaacagtccatcaaaacaatcttggtttcccgatctcgtgactttgtagttacttctgatggaagtaaggtgccggtgtccgaacttgaggggaagactctaggtatatatttctcagcgtcttcaatcaagccatctgctgattttactcaaaaacttgctgaagtttatagtaagttgaaagaaaatggggagaaattcgaggtggttatgatatcgcttgatgatgatgaggaatccttcaggcaaagctttggggcaccatggttggcattgcctttgaaagacaagagctgtgagaaattggctaggtatttcgagctcttggacccttcccactgttgtcattatcgggcccagatggaaaaactctccaccctaatgctgctgatgcgattgatgaacacgggattgtggcctaccccttcacccccgaaaaatttgcggagcttaaagaaatagagaaagcaagtga

SEQ ID NO: 88 - DNA, 445 bp, Gossypium hirsutum
  Clone ID: LIB3493-026-P1-M1-G3
cccacgcgtccgcccacgcgtccgctcctggcagattaagaacattttggctcccagtgctgctgacaaaagtaaggagtggaaaagctgcaagcttgacttgaagaagtgtacagaaacgcagctcaaaatcatccaagatttcaggacgcaattcttaagtgccctgaacagagccggggtgatcaactctccatctaaaggaatgttcatagattcgtgctatgcccactgtcaagtaggaaagcagatacaatggtcaagcgatagttctccggtagtgagtaacatgaaaattgccaaggctgttggagactggtattatgagcggagccccatcaaaaagcttggctggccttattccttgcacccctacctgcccaaaagttgactctgattcataaatctatacatataattatggactgcagtttatttattagat

SEQ ID NO: 89 - DNA, 403 bp, Gossypium hirsutum
  Clone ID: LIB3493-026-P1-M1-G4
cagctactgaccctaaaagaagtgcccgtgattcacatgtacccgtgttggctccactgcctataggatttgcagtgttcatggttcatttggctactattcccatcaccggaactggtattaaccctgctagaagcttcggcgccgccgttatttacaacaacgacaaggcttgggatgaccaatggatattctgggttggaccaatggtgggagcacttgcggcggcggcatatcatcagtacattcttagagcggcggctattaaggctttgggatcttttcggagcaaccccagcaattaaaagcttaaaagagaataaaaccacattatgtttgtcttattgtgtttataatgcttcttcattgatggttccttggtttgtatttgatgatgattgtt

SEQ ID NO: 90 - DNA, 489 bp, Gossypium hirsutum
  unsure (1)..(489): unsure at all n locations; Clone ID: LIB3493-026-P1-M1-G5
cttcgtttcatctgcttcatttgtttcgaaatctttgaacaaaaatggcctctttcaattgctttgctttagcattcttgattgctttgtcatttgcaggcattgatgttggggtagcagctcgtcaccttctgcagcagcctcgaacgcaaagtttaccatctttccctaatctcccaacgccatcccgaccatcattctcatggcctggggcacttcctccacttcctaccacattcccaacaggactgccccctctgccaagcattccctcagtccccacaatcccaactgcaattccccctattcctttctcttttccaccattgccatctttccctaatctcccaaaccctggggcgcttnctccacttnctaccacaatggccagaggactgccgcctctgccaagcattccctcaatcccaactgcagttccctctattccttccttntctccaccaccttctcgttctactccttgaaata

SEQ ID NO: 91 - DNA, 278 bp, Gossypium hirsutum
  Clone ID: LIB3493-026-P1-M1-E9
ctttgagaggctggttttgctttgggctcttgatcctgctgaacgtgatgcccttttggctaatgaagccaccaaaaggtggacttcaagcaatcaggtccttatggaaatagcctgcacaaggtctgccaaccaactgcttcacgcaaggcaggcttatcatgctcgttataagaagtcgcttgaagaggatgttgcttatcacacgactggcgactttcgtaagctccttctacctttagtgagttcatactgatattacggagtggaggttaaaa

SEQ ID NO: 92 - DNA, 446 bp, Gossypium hirsutum
  Clone ID: LIB3493-026-P1-M1-F1
gatgggttcgtaaggatggagcagatgaagatggaaatggcgagggagatagagacgatgaggatggagatggagatgaagaggaccgaggtgatattggagtcacagcagagaattgttgaagctttcgctaaggcagtttcagagaggaagaagaagcccaaaagaatgcccttacctcagtcctaatggattttccttactgcaatgtgtccaatccttttgactacggatttgcaagtgtaagttggtggaatggttaggggtttacttcaattttcatctttctttgtttgattattgagtgatagcaatagtgcattctgatctgctgtagcttttgtctttttctggactaaatgtatctttgtttttactcctattatgaacttttctcctaatcctagtttcttataataataaaaataagtgcggtctgtcttaag

SEQ ID NO: 93 - DNA, 459 bp, Gossypium hirsutum
  Clone ID: LIB3493-026-P1-M1-F10
ctccctttccttgaccaatagtactgccagcaacggtacagtggcgggcggactactggaaaatggcaacttcgaaaacgccccaaatgcaacaaacatgaaaggcaccgtggttgtgggacgctacacaataccaggatgggtgaatgaggggtttgtggaatacattaagtcggggcaaaagcaaggggacatgctgctggtggtgcccgaaggggcctatgctgtaaggctaggaaacgaggcatccatcaagcagaagataaaggtgatcaaagggatgtattactccatcacattcagtgcagctcggacttgtgctcaagaggagcgtttgaatgtaacggtggcgcctgattccggcgttctgtccatccagactgtgtacagttgcagtggttgggacaactttgcatgggcgttcaaagcaatttttgatggtgcagagttgattatcat

SEQ ID NO: 94 - DNA, 431 bp, Gossypium hirsutum
  Clone ID: LIB3493-026-P1-M1-F11
ggccgagtgagctgaatattactgggattatgtcagcacatggatgtaaagtgtttgctgatacccttttagccaatcctgaagccatgggaacatatgaggataatctgaatggaggattgactgtgttctgcccactggatgatgcatttaaagcctttttaccaaagtacaagaacttgactgcttcagggaaagaatcattccttggagtcttttggtgtgcctgtttaccagtctttatccatgttgaaatccaacaatggtctcatgaacacattagctaccgatggtgctagcaagttcgacttcaccgtccaaaatgatggcgaacaggtgacactaaagaccaagatcaacaccgtctaaataaccgggactttactcgacgaacaacctggggcgattatacaatcgacaaggtcttgatg

SEQ ID NO: 95 - DNA, 461 bp, Gossypium hirsutum
  Clone ID: LIB3493-026-P1-M1-F12
aggtttgtttttttggaatcattgccagtgtctgccagtggaaaagtagactatgcacagttgacagactcaatattctgcatcagtcatgttaaagatgagataggtgacattggggctagcaatctcatgcaaattataaaaaaggctatttgtgacgctttaatggtggaagatgtttcagatgatgatgatttctttatgataggtggtaactccatcactgcagcacatgtttctcataatcttgggattgatatgagattgctgtataccttttcaactccagctaagctcgtaatttccctcctagagaaaaatgtattaaataatacaaaatttggagtcaatgatatcccagaatcaacaatggaaccagacaaggtgaatcaatattcttttcctgaatctgaaacttctgatccacttggctcaaagctacaaggacatttgcattgatg

SEQ ID NO: 96 - DNA, 408 bp, Gossypium hirsutum
  Clone ID: LIB3493-026-P1-M1-F2
cggacgcgtgggttacagaccaagttcagtcaggaacctgagcctatcgatggggaatattatagaaaaggaatcggctcgcgattggtggatatgtacaaagaggcttatgagagcgtagagatccccaagtttgatgacacagtcactcctcaattcaaaccgaaatttgatgcattgttggttgaattgaaagaagcagaagagaattgtttgaatgagtactagcgtatggagaaagaaattgccgacgttcacgaactgactcaaaagatcagcaccatgacagcacatgagtactttgtgaaacatcccgaactgaaaaagaaatttgatgatgagatccgcaatgacaatatgggctattgagacatgtttggtgatataagggtcaagctttaaaacagt

SEQ ID NO: 97 - DNA, 385 bp, Gossypium hirsutum
  Clone ID: LIB3493-026-P1-M1-F3
aacgatcgtagaaagcaaagaaattttgttcaaggtttccaaagtctcgacgacgccgatcgacggccagaagcctggaacttctggcctccgtaagaaggtgaaagttttcattcagcctcattatttgcaaaatttcgttcagtcaacattcaatgcccttacaccagaaaaagttagaggtgctacacttgttgtttctggtgacggtcgttatttttcaaaggatgctattcagataataattaagatgtcagctgcaaatggagtaagacgcgtatgggttggtcaaaatggattgctttcaactcctgctgtatcagctgtaatacgtgaaaaagttggtgtcgatggatccaaagcaactggtgcctttattttgaca

SEQ ID NO: 98 - DNA, 406 bp, Gossypium hirsutum
  Clone ID: LIB3493-026-P1-M1-F4
gagacataccacgatggcaacaacgacggagaagcaagccatggttgttggaatcgacgacagcgagcacagtacgtacgcgctgcagtggatcctcgatcacttctttgctcctttcgcttccaatcctcctttcaagctcgtcatcgttcatgccaagcctactgcttcttctgctgttggtctcgccggacctggagctgctgatgtattgccctatgtggatgcggatttgaggaagatcgctgcccggggttgttgagaaagccaaggaactctgccttagcaaatcggtacatgatgccgtagttgaagtggtggaaggtgatgcaaggaatgttctcttggacgcttataaaaatcactatgcctacgtttttgctgttggtagccattgttatgggtc

SEQ ID NO: 99 - DNA, 403 bp, Gossypium hirsutum
  Clone ID: LIB3493-026-P1-M1-F5
ttcgtctataaaaatcatacgaaataaacaaactggacagtctgaaggatacggattcgtggagtttagctctcgagcaacggctgtaaaggttttacagagctgtaatggttctctgatgccaaatacagagcagcctttccgtctgaactgggcttcgttcggtgtgaacgaaagacgatctgatgctggctctgatctatctatattcgtaggagatttggctgccgatgttactgatacagtgttgcatgaaaccttttctagtaaatttcaatctgtcaaaggagcaaaagttgttatcgattcgaataccggtcgttcgaaaggttacggtttcgttcggttcggtgatgaaaatgaaagggcaagggccatgactgtaatgaatggagtgtattgt

SEQ ID NO: 100 - DNA, 441 bp, Gossypium hirsutum
  Clone ID: LIB3493-026-P1-M1-F6
gacccttcatagccatcgtctgcatagaatctggcactccatcatcccagcccccaaaagcctgtcttctcagaccttccaagctaacgtgtgcgccgctccattcaccattcgaggcccaaagagtgaatcaccttccacgatcagtcgtcggaagcccatagcacccgctaaaagtagagccctttcgcatgcccgtgccttcggcacaaaagcatcaaccacatccttaaaaagataagtccccgcccccacaatttctccttccgaatttctagctaaaactgatgttatagcgattctatcaacactttgaaaagtcgcatcaaattttaacttaataactccagtgtctgggggtttccaaatttcatttgctatagatctaaaggatggacagaagttctattgattaagaataagttcttgattataccctct

SEQ ID NO: 101 - DNA, 303 bp, Gossypium hirsutum
  Clone ID: LIB3493-026-P1-M1-F7
caaggatcgagccggaaagccttaccgaggatgtctttcactggctgttgatgagcttactgttcttaacgggaagactccaatggaagtgtatcaggatttctgtgaaagcttcaagtcggctttttcggctttcatcggttctacgatcacgggaatcacaatgggtctcggaccagacggtgagctccggtatccatctcaccgtgggtttgccaaaagtggcacagttccgggagctggggagttccaatgttacgacaaaaacatgcttctccttcttaagcaacatgctaaagcatg

SEQ ID NO: 102 - DNA, 326 bp, Gossypium hirsutum
  Clone ID: LIB3493-026-P1-M1-F8
tgaagatgtgccgacttgcctctctcgtaagaacaccgatttagggtcatcaaagcaaatggtgaagcaatttggcttctctggactcttgagcggccagcaaaaatccaatccagatttctacaattggaatcgaattaaggttaggtactgcgatggatcatcgttcaccggggatgctgtcgatcgagctaataatctctttttcaaaggaaacagcatatgggaatttatcattgctgatctactagcaaaaggaatgagaaatgctaaaaatgctattcttttcggctgttccgttggtggattggtttctttattgcact

SEQ ID NO: 103 - DNA, 217 bp, Gossypium hirsutum
  Clone ID: LIB3493-026-P1-M1-F9
gaaagaaacaacagggcttagggagaagcatgatgaaaactgcgactgtgtgtttagctggaatggaataagtggaggagacccgtgtgtgtgctgtttctttgttatttttcttaaaacgagtaatatcaacatcttcctcctatttgatgaaaatgataaacgatatctatagcagtgaaactaaataaaaaccttaaaagatactattgccatc

SEQ ID NO: 104 - DNA, 447 bp, Gossypium hirsutum
  Clone ID: LIB3493-026-P1-M1-G1
cttttgggtatttgtttcgaaaaagttgttccatgaaagcgtgatgattgtggtagctcgtggggatagaagcggagaggatggcatcccaatgctactgaagatcccacgcatgtttgatccatggggtggttatagcataataggattcggtgacatccttttacctggactgttgataacattttcactcaggtatgattggctggctaacaagactcttcgagctggctacttcttgtgggcaatgattgcttacggcttaggtcttctcattacatatgtggctctaaatttaatggatggacatggtcaaccagcactcctttacattgtcccttttacactaggaacctttttaaccctaggaaaaaagagaggtgatctaagagttctctggacaagaggagaaccagaaagaccctgtccccatattcgacttgaaca

SEQ ID NO: 105 - DNA, 489 bp, Gossypium hirsutum
  Clone ID: LIB3493-026-P1-M1-G10
aaaaagaaaaaaaggcctctcaaactgtacaaagtccaaggttgcatggatttctcagctaataattttcattagagaagtagtgcaactttgttctcgagattcatcttgtgttgtattcggtttaggcacgtaaaagacgtgcttcagataattgatccaagagagttgtgcgcttagtcatggattctttgtggaagcttttgtatttgcttgagcctgccccacttactctcatacttacagcagtggctgtgacatttggatctgcatttcgtgctctgaattatgggaaagaaatggagaggaaccgtgacttgtcggaagcatcaattactctagatcgggcccaagcattaatgatcccaataatgagctcctgcagcttgcttttgatgttttaccttttttcttctgtttcacaacctcttgactgcattcaccggtattgcctttgtttcatccttaattcttctgtctttccctcat

SEQ ID NO: 106 - DNA, 435 bp, Gossypium hirsutum
  Clone ID: LIB3493-026-P1-M1-G11
gaggaatcggcagatgaccaggaggagtctgggtggaagtatattcatggtgatgtgttcagataccccaagcacaagtccttgtttgccgccgcccttggttctggcacccagctcttcactcttacaagtttcatttttatccttgctctagttggggtcttttatccatataaccgaggagctcttttcactgctctggtcgtcatttatgcccttacatctggcattgctgggtacactgcagcttctttctattgccagctagaaggaacaaattgggtgagaaacttattactaaccggaagcttgttttgcggacctctttttgtcacattttgctttcttaatactgtcgcaattgcttataaagccacagcagcattgccatttggaaccaattgtggtgatttttctcatatgggctctagtcac

SEQ ID NO: 107 - DNA, 246 bp, Gossypium hirsutum
  Clone ID: LIB3493-026-P1-M1-G12
gttttgtttgttttttgaaatctgatgtctccgccgcttcttggcgtggaggaagggggtcagaacaatgtgactttactgggttcttctggctctattgatagtgtgtgccagaataatgctgaattgaaggagcgcaattacatgggcttgtctgattgttcttctattgattgctctgatgtcacccttggttccgtcgatagcaaccgtaagtttaattctgtaggcatcagatcttaggct

SEQ ID NO: 108 - DNA, 400 bp, Gossypium hirsutum
  Clone ID: LIB3493-026-P1-M1-E4
ccgccatcttcaataatttcttccgttgatctttgttagagattagctggttaaggggtcattatgggaaagatcaagatcggaatcaatggatttggaaggatcgggcgtttggttgcgagagttgctctccaaagcgatgatattgagctcgttgctgttaacgatcctttcatcaccactgaatacatgacgtacatgtttaagtacgacagggggttcccggccaatggaagcatcatgagcttaaggtgaaggactcaaagacccttctctttggtgaaaagcctgtcacagttttcggtatcagaaaccctgatgaaattccatgggctgaggctggggctgagtattttgattagtctactggtttctcactgcctaggcaaggctcttgtta

SEQ ID NO: 109 - DNA, 268 bp, Gossypium hirsutum
  Clone ID: LIB3493-026-P1-M1-E5
caccttcgaaaagattaatctatacctaatttgaagatggaagtcggagcttcttgaagtaatttcaagctctacgatcaattctaattgctgaaatatgaagataggttagtgttcaaatccctcgaatctcccgatcaaggcttttcgatttaccgtcgtcaaggaaacatcgaacccctatctgatgaatcttcttttggaaaaccatccaaaacctttaccatttatggcgttgctggaacaattagattgcttgcaggaacat

SEQ ID NO: 110 - DNA, 183 bp, Gossypium hirsutum
  Clone ID: LIB3493-026-P1-M1-E6
ggcaaaggagattcctgatgagtactttatcatgttggttggtgatatgatcacgggggaagcccttccaacttaccaaactattcttaataccttggatggaactcgtgatgaaacttgggctagccctacttcttgggcatcttggaccagggtctggactggcttagataacatactcac

SEQ ID NO: 111 - DNA, 162 bp, Gossypium hirsutum
  Clone ID: LIB3493-026-P1-M1-E7
cggacgcgtgggtccctcctctcttatagaaaccactacatggggatggcacccataaggacaaaagaaaaaaaatggaacatgctaccaaatcttttgtttttcttgcatttgttctacttttttttctttcatctggagtagttgatccattgacttata

SEQ ID NO: 112 - DNA, 453 bp, Gossypium hirsutum
  Clone ID: LIB3493-026-P1-M1-E8
gaacaggtgtgacatcacttacatcttgctggagatggatcggattctgaggccggaagggaccgttatatttagggacacagtggagctgcttgtgaagatccagagtataacggatggaatgagatggaagagtcagataatggaccatgaaagcggacctttcaatccagagaaaattcttgttgctgtcaaaacatactggactggtgaagcaactcaaaaacagctctaactgggatttcaatcatcttttttttctgcacttcatttgttacattttttcatcttgggaacatgtaaaattactgaaaggttaaagggtgtgtatgatttaatttttattttttttctaatatctttgtttcttattgtttacttttttttattaggtcttcttcaacagtattgtgtgttatttatgtttattacttatcatttttatttattttc

SEQ ID NO: 113 - DNA, 418 bp, Gossypium hirsutum
  Clone ID: LIB3493-026-P1-M1-E11
cggacgcgtgggggatgccactacccctaaatactcgaaggctaggtatgatgaaattgtgaaggaagtctcttcctacttgaagaaggtgggatacaaccctgacaagattccatttgttcccatttctggttttgagggtgacaacatgattgagaggtctaccaacttggactggtacaagggccctactcttcttgaggctcttgacccagatcaaccaacccaagaggccttcagacaagcctctccgtctcccacttcaggatgtgtacaagattggtggtattggaactgttccagtcggccgtgttgaaaccggtgtcttgaagcctggtatggttgtgacctttggcccgtctggtctgacaactgaagttaagtcagttgagatgcaccatgaagctcttacagaagc

SEQ ID NO: 114 - DNA, 238 bp, Gossypium hirsutum
  Clone ID: LIB3493-026-P1-M1-E12
gtcgaatcctgagtggaatcaggtgttcgcattttcgaaagataggcttcaggcttcattgcttgaggttacagttaaagacaaggattttgtgaaggatgacttcattgggaaggttttctttgatctcaatgagattcccaaaagggttccaccagatagtccactggcaccgcagtggtataggttggaggataggcagggacataaggttaaggggggagttgatgttggctgt

SEQ ID NO: 115 - DNA, 378 bp, Gossypium hirsutum
  Clone ID: LIB3493-026-P1-M1-E2
cacccagatgctcttaaagcagctttagctgagttcatatcaacgttaatgttcgtttttgctggatctggttcaggcatggcttttaataagctgaccgacggcggtgcaacaactccggctggtctcgttgccgcctctctagctcacggatttgcgcttttcgtcgctgtctccgtcggcgctaacatctccggtggccatgtcaatcccgccgttacattcggtgctttcgttggcgggaacattacttttttacgtggtatcctttattggattgctcaactccttggctcaaccgtcgcttgcctgttacttaagttcgtcactagtggcctgggagtaccatgctttggactttcatccggcgtgggagca

SEQ ID NO: 116 - DNA, 286 bp, Gossypium hirsutum
  Clone ID: LIB3493-026-P1-M1-E3
ttcgatttttgtattaagagtcgccctttggtgtttttctaattcaatgagtgaggtgaagaaaaatgtcttgctgtggtggaaactgcggttgcggctccggttgcaagtgcggcggcggctgcggcggttgcatgatgtaccctgagatgaactttgctgagcaaaccacaactgagacacttgttcttggcgtggcaccccggatagtgaactttgttggagctgaaatggtaactggggctggtaatggatgtaaatgtggagataactgcgcttgcatccc

SEQ ID NO: 117 - DNA, 470 bp, Gossypium hirsutum
  Clone ID: LIB3493-026-P1-M1-D8
gtagatcaacttaacttctatttattcaaaagtcaaacgaataaaccgggtccctgctccacatacgtctatattaacattgtcgccacattctttctctattaccctgctgatatgataccaaaatgacagcttgccgatcaccattcatattaggaggtcgtatcgcgagagcacctagatacccttccttccatgtgtccacaccaacctccgcctaccctacaaccctttccccctcatcgactggaaccgtcacgtcgagaccatcttcgcctacttcttacgctctattccccaagtcagattacgacgggagtgcctccgagtcaaagacggggggtccgttgcccttgattgggtctccggctaccaccgccgcttttcttctgattataccgttctcattttactcccggatttgactggaggaagtctggattcatatttatgacatatgttaactaaag

SEQ ID NO: 118 - DNA, 487 bp, Gossypium hirsutum
  Clone ID: LIB3493-026-P1-M1-D9
cccagatccattattctatatatatatatatatatatgttccattggtggagatgaagatatacaaattacacattacatttgaaaactagaggcacagatctaagagaggggcgactgagaagtgaaaacacagcaaattttcaatgagtgggaaaatcaccatggccatggctgcactttttgtagttctagctgcaaatgtgttgcagagtacaaatggtgtatcttttacagtgggtgactttactgggtggataaagcctatcaaagaagatttctaccagaattgggctcatggaaaatccttcgttaaaggggatgttcttgggttcaaatccggtcttgaaaaatctgaaaaagttgcagaggtaacggaaaaggcttacgatctgtgcgaaattgccagtactatatcattcgccatgcccataccgataaatattacttttaacaaggcccggacttattaattcatttgtactatt

SEQ ID NO: 119 - DNA, 446 bp, Gossypium hirsutum
  Clone ID: LIB3493-026-P1-M1-E1
ggaccacaccatggtccattccatgccattcacaggctgcaagtgtcaaaacaacgccatgctcacaaatggttatattgccacctcagcaaacagaaaactgtcaatttcctcgagaagagagcaatgcatctcttgaagacagccttgaaggacctacttgcagaaaagcatcggtgcaaagatatcttgagaagaagaaagacaggtttaagaacaagggaaagttggcaatgtcttcatctccgaccttagacatctacttaaatcaagggggagatcagttttcaaatgagcagttgaaacaaagtgaaccattattctccccaagcagaagtgcaacgcatgcctcttgagtgcagctccattgaaaatgttgcaaagattccccgtcttactactgatggaaaagattcattcaaaatatgacccaagaatggagccct

SEQ ID NO: 120 - DNA, 428 bp, Gossypium hirsutum
  Clone ID: LIB3493-026-P1-M1-E10
ctgctttgctctgaaaagtccaagtttttctccaatggcgaccgtctctgcaactcctctgttgaaagatgagctcgacatcgtgattcccacgattaggaacttggactttttggagatgtggagaccctttttccagccttaccatctcatcattgttcaagatggtgatcctaccaagaccatcaagggtccctgaaggcttcgattatgagctttacaataggaacgacatcaacaggattttgggtcctaaggcttcttgtatctatttcaaggattctgcttgtatgtgcttatggtacatggttttcaagtagtaattcatctataccattgatgatgactgctttgttgctaatgttcctgtttggcttgactgtcaaatcattttaacagctcattctgatccttccgagttcatactt

SEQ ID NO: 121 - DNA, 343 bp, Gossypium hirsutum
  Clone ID: LIB3493-026-P1-M1-D3
gaaagcgttagaagagcctcataaaaattttgaaggtcatgttttgcattgccaaagagccattgatgggccgaaatcgactaaagggggttatggaggaggtacttccggtgggcaccatcagcagtaccaacagcatcagcatcagcaaggacatcagattcagtctcattaccatcatgctaagaagggaaagtactcatctggtggatcagagactggtcatttgatggctccatctggacctactgcagtggggttcaaccctggagttgctgctggggggtttaaccctgctgctgttgtacctactttaaacccaacgcttggacaggctttgact

SEQ ID NO: 122 - DNA, 480 bp, Gossypium hirsutum
  Clone ID: LIB3493-026-P1-M1-D4
ctgagattgatcccatctgtgcccttcaggctcttatggaaggacttcaggttttgaccctagaagacgttgtctccgaggctgatatcttcgtcaccacaaccggtaacaaggacatcatcatggttgatcacatgaggaagatgaagaacaatgccattgtttgcaacattggtcactttgacaatgaaatcgatatgctcggtcttgagacctatcctgggtgttaaacgcatcaccattaagcctcaaaccgataggtgggtcttccctgaaaccaaaactggcatcattgtgttggctgaaggacgtctgatgaacttgggatgtgccactggacacccaagttttgtcatgtcctgctcgttcactaaccaggtgattggccagctcgagctatggaaggagaaggcaactggaaaatatgagaagaagtttacgtattgccaagcacctcgacgagaaagtgctgcacttacc

SEQ ID NO: 123 - DNA, 457 bp, Gossypium hirsutum
  Clone ID: LIB3493-026-P1-M1-D5
ctgatggtacagggaacaaagctccaggaaatctgccaacaaaaaccggtgaaaagtctgataatggaaaaccaactgcctttatgggttctcaacatcaaggcatgtttacatcagtgcatagccaacatatacaatttccagtgtatccaactccttcaaccatgggttactaccatcagaatcctgtatcttggccagcaactccagcaaatggttttagtgccttttcctccaaacccatatctttatactggccctcttggctatggtttaaacggaaactcacatttatgtatgccatatggtactctgcagcatttagctgctcccccatttaatcctgatcctgttccagtttatcagccagtttcagaagccaatggcttgtatgcagaggagcgaactctgattccaaagcctggtaaaacaagtgaagctttcactgaatttaatg

SEQ ID NO: 124 - DNA, 349 bp, Gossypium hirsutum
  unsure (1)..(349): unsure at all n locations; Clone ID: LIB3493-026-P1-M1-D6
cgagcatcttttatatatcccgacgggttcggttcttcccagtttaatggcggagtgcttgattaatgtctcgaatggcngtggtcnnaacaacttttgtcctcaacaatgttaaaatcattagcccgaatatatgtactgtcgggtcgtccatccggtgccatggtatctattgggcgttaaaccctgaacgtaatatatctttacatacttgctctaacaccatggttcctgtaccaccaccaccttctctggttgccccaccacctttattggcaccaccaccttcatcaccagtcccatttttttcttcccctgaagatgattttccggtgcctgtcccattacc

SEQ ID NO: 125 - DNA, 426 bp, Gossypium hirsutum
  Clone ID: LIB3493-026-P1-M1-D7
cggacgcgtgggcttctcttcccttttctctttcttgcctctctgttcgcactgtcttcttcttcttcacttaacagtgacttgatttgtaatggattgttgtctttgagcttgcttttgttattaaacgaagaaaccctgcaagatttcagcctagggaaagatgagtatctgtcagtttctgttctttttctttcctttgttcacactctacactccaatgtcggttcatgcgaacacagagcttagatctttaatggaactgaaggcttctttagacccaacaaacaagaatcctcaggtcatggaaaagcgatggtgacccttggtagggttcctttgtcggtgtggcttgtaatgagcaccgtaaggtggctaacatttcgttacagggaaagggtctttctggtcaagtctcgcctgctt

SEQ ID NO: 126 - DNA, 458 bp, Gossypium hirsutum
  Clone ID: LIB3493-026-P1-M1-D1
gcgacaatgctaaggttaaagtggatatccccatcacagttgtccctgggaagaacacgattgatctccttagtttgaccgtagggctgcagaactatggggccttctttgacctatcaggggcagggataactggtccagtgaaactaaatggtttaagtaatggtagcagtattgatctctcctcacagcaatggacgtatcaggttggacttaaaggggaagattcgggtctaccaagtggaagttcatcggaatgggtttcacaacccgcattgccaaagaaatcaacccctaatatggtacaagacaaattttgatgcccctacttgggaatgacccctggtgctttagacttcatggggattgggaaggggaagcatggatcaacggacagagcattggacgatattggcctgcctatatcgcttcaaacagtggctgtactgacttttgtg

SEQ ID NO: 127 - DNA, 392 bp, Gossypium hirsutum
  Clone ID: LIB3493-026-P1-M1-D10
gaaaattgcagctgatgtgccggggaaaactttggaagagatgaaagagcactatgagcttctagaggatgacattaaccagattgaatctggttgtgtgcctctccctccgtacgattcttctgatggttcagccggccatgctggtgacgaaggaactggtaaaaaaggaagcagcaatttagggcattataacagtgagtcaaatcaggggagtaagagttcgaggtcagatcaggaacgtcgcaaggggattgcttggacagaggatgagcacaggttatttcttcttggtttggataaatatggaaaaggtgactggagaagcatatcccggaactttgtggtcacaagaactccaacgcaagtggcatgtcatgcacaaaagtatt

SEQ ID NO: 128 - DNA, 356 bp, Gossypium hirsutum
  Clone ID: LIB3493-026-P1-M1-D11
cttattattggtctctttgaggctgctcttctgctctcttcgttcccgacacaacataagttattctggtttttggtggaggcggcggcggcggcggcggcgctgtctgaaattcaacaagtctcgtaatccgacatggcgaccaaagggttcgttttgtatctgctgtccggtttttcgatagcagttctctctgttttgttcatccaaaaaagcaacaacgacaacatgaaccaaagctcaaatctcttagagtccccatataatttatccaccactgaaaaagtttggcctgcattggagttgaactggaggcttgtaatggcgacggtgatagggtttctaggatcaacatg

SEQ ID NO: 129 - DNA, 461 bp, Gossypium hirsutum
  Clone ID: LIB3493-026-P1-M1-D12
atgatttacagatttttttaagcacaaggtgggctattttattgaacttgcacgtggagatgttccgtgtgaacaatgtagaggatatccttcaggttcttatagtctttgctgttgagtcattggaactggattttgctcttctgtttcctgagcgacacatgcttctgcgagtgttgcctgttcttggtgtcatggcaacatcatcagagaaagatagtgaatcactgtataagagggtgaaaataaatagactgatcaatatatttaagaatgatccagtaattcctgcattcccagatcttcatctttcgccaactgcaattttgaaagaattgtcaaattacttccaaaaattttccagccaaactcgtcttctcactcttccatcacctcatgaactcccaccccgagaagcacaagattatcagaggcattatctgattgcaatcacattggag

SEQ ID NO: 130 - DNA, 450 bp, Gossypium hirsutum
  Clone ID: LIB3493-026-P1-M1-C6
ccaaattccgatcggaagatcaagttagggctttcagtcgattttcaatggaaagaatcagaagagcttcgcatgcaggatcttggtacactgataacccaaaaaaactggcggaagagcttgatggatggatcacggcggctggcttgcctaaatcctctgatgtaagaggtgtaattgctccgcatgcaggttattcatattcaggtcgtgctgcggcctatgctttcggaaatatagaccccaacaaacatttctcgggtattccttcttggtccatctcaccattattacactccaaaatgtgctctgtcaactgctacagtatacaagacaccaataggggacctacctaatggatttgaagtcatcgaagagctgaaagctacaggaaaatttgaactggtgaatcttcgtgttgatgaagctgagcatagcatgggaatgcac

SEQ ID NO: 131 - DNA, 388 bp, Gossypium hirsutum
  Clone ID: LIB3493-026-P1-M1-C7
cacctgttggtccatctacaatgaacatgcacccacagagtggtgcatcgatgcttggaagtagccccgatgctagacagagatttctgccatactctcatgggaatggacttggtgtgagtccatcagctggaaactttgcaccacttccccttggtactagtccctcgcagtttactcctccaaactcctatggtcaagtttcaggtggctctcctggacactatggtcctacttctcccgcaagaaacagttgtcaaggatcacctttaagtaagatggctgcagctgggcagtttaatagaagaaaaggttggggatatttctggaagttcccaatcttaagagagttcatcttctttacatttgcatggacaagtgaccgatg

SEQ ID NO: 132 - DNA, 483 bp, Gossypium hirsutum
  Clone ID: LIB3493-026-P1-M1-C8
aaagagctttaatctttcaggaatggggtgcagtgcggggcttatctggattgatttagctcgagatcttctccaagtacaccctaattctaatgcagttgttgtcagcactgagatcatcactccaaactactaccaaggaaaagaaagagccatgctccttcccaactgtcttttccgcatgggtggcgccgcaatcctcttgtcgaaccgtcgttccgagaggaggcgtgccaagtatcgtcttgtgcatgttgttcgaacccataaaggtgcagatgataaagcctatcgatgcgtgttcgaagaagaagacaaagaaggcaatgttgggatatctttatctaaagatctcatggctattgctggagaggctttaaaatctaacattaccactattgtgcctttaggtttttcagcatttgaacaacttctatttctcctcacactcattgggcgtaaaatcttatatccatttggaag

SEQ ID NO: 133 - DNA, 356 bp, Gossypium hirsutum
  Clone ID: LIB3493-026-P1-M1-C9
ctctgatctttatacacttacgatagcaagtgcagatcccaagtcgatgtctgcatggaaaccggttgagtttaccaaaattattactcaatggttcacttaggacggagtttttgttgatgttttatttttttatgattttctttctaagatatttttacttttcttttaattttattatatatatgtaatatattattttgtcttttattgttgaatttttatttatttttatttcaatgcgtaatgtttctttattttttctaattttcttttctattttttttttatattattatttattttttattattatttgaattattattatttataatttactcatgtttatttat

SEQ ID NO: 134 - DNA, 459 bp, Gossypium hirsutum
  unsure (1)..(459): unsure at all n locations; Clone ID: LIB3493-026-P1-M1-C12
ggttgcttttatacaaatggccagatctgcagtgcaacatcacgccttattgtgcatgaaagtattgcggcagaatttttggacaggcttgtgaaatggagtgagaacattaaaatttcagatcccttggaagaaggttgcaagcttggccccattgttagtagagggcagtatgagaaagtaatgaatttcatttcgaatgctaagagtgagggagcaactattttgtatggtgggaatcgtcctaagcatttaaagaaaggattctttgttgaaccaaccatcatcactgacgtaacaacctccatgcaaatatgggaaggagaagttnttggacctgttctttgtgtcaaaacatttaccaccgaagaagaagccattgaattggcaaatgatacccattattgtttgggaggggctgtggtatcgaaggatcgagaaagatgtgatcgtgtaagc

SEQ ID NO: 135 - DNA, 486 bp, Gossypium hirsutum
  Clone ID: LIB3493-026-P1-M1-C2
gttgctatgacaaagtgtcgtctacaagcaagaaatttcatcactcaagatggaatgagcgggacaaagaaaatgaggcgccacaccagtgccatgcccctaaatgttgtatcatctgtgggtagcataaatgatagtttcaaacagttaaccggttcggagacatctgacttggagtcaacggcaacatctactgtcaagaagccaagaattgaggctaaccatgcccttttggaagaaataagggaaataaatcaacaacttatagacacagttgttgatatcagtgatgaagatgttgatccaggtacggtggcaacagctgctgaagggggtgaaggaactgttgtcaagtgctccttcaatgctgtggctcttagttcaaacttgaaatcacagtacatgtcagcccaaatgtcaccaattcagcccttgcgtctgctagtccccacaaattatccaaattgttcccccgtcctattagac

SEQ ID NO: 136 - DNA, 474 bp, Gossypium hirsutum
  Clone ID: LIB3493-026-P1-M1-C3
gaatcaccctcttttcttcttcttttcttctcatttcacctcaattccattgggtgctttcttcttgttgttgttagagagtcaccaatgagctccattatgcagagctttcaaaagagccgatcactccccctctctcaaactcaatccaaagagcaagcgccattaccagccctacgaagaaggctttcctctttgtctcttaaattacatccttccatctcttcgccatcagcgccgtcatggtccttccccagatccaagtctttgtcttccatgggagactatgctggtagctccatcaggaaatggtgggactggggatggtcttgggttctttccagaaaacccatgtttgctcaagaccttgaaatgaatgaagaagaaactagggttctaggatgccacaacaaaggcagctggaggcatgttttctacaaactaagatccgagatcaagaaacgcatgggatct

SEQ ID NO: 137 - DNA, 411 bp, Gossypium hirsutum
  Clone ID: LIB3493-026-P1-M1-C4
ggtcgttccacctggaaacactggtcttgacccatcacagacctctttgttccaggtgctcaatattcccaccaagattaacaaaggtactgttgaaattatcactcccgttgagcttatcaagaagggtgagaaggttggttcttccgaggctgcacttcttgccaagctcggaattagaccattctcatacggtcttgttgtcttgtctgtttatgacaatgggtcagtctttagccctgaggtgcttgaccttaccgaggatgacctgattgagaaattcgctactggtgtctccatggttacggcattgtctcttcgccatctcgtacccaaccctggctggtggaccacacatgttcatcaatggctacaagaacattatggccgttgctgtcgcaactgagtatt

SEQ ID NO: 138 - DNA, 430 bp, Gossypium hirsutum
  Clone ID: LIB3493-026-P1-M1-C5
cggacgcgtgggcggacgcgtgggcggacgcgtgggcggacgcgtgggcggacgcgtgggctcaggtaacccaaatattcgttcctctttcgctctcaatcctcgccactaaattttacttcttaaatttcattttcttttgaaatatttcaatcttcttactgatctaattgctttaccggttagacttgtaagagttttcgatagatccgtcgagtacattaagaaaaaatgggaggaggagaacatggaggggcatggagcagaggatttcaggacgaaggtgtggagcatgtctggtggcccatattgccggcccaagcactggcgtcgcaatactgcgattggtatgttcggcgttttcctcatttgtatcccgatcgccatgaaatccgccgagctcgagcaaaggcctcatcagcccgttcgt

SEQ ID NO: 139 - DNA, 410 bp, Gossypium hirsutum
  Clone ID: LIB3493-026-P1-M1-B9
ttccgctacaccctccgatggcgactttgattatgcacgtcccgattggtcttccggttacgcgcacttagcttatgccgacgaagctcttgaaactgaatacagtagctatcttaaacccaagccccgacctggacgattcgaacctgcacctgcttttggtgctggatctggtgactatggaaggaaacctgaatatgagcaattcgaatctggtcatggacgcaagccggatttcggacgacccggatccgaatttgaatctgattatggccgaagacctgaattcgagcagcctcctgaggagtttggatctgggtatggccggaggccggcatatgatgcattcacatcaaccggattttggatcctggcggagatcataattttgagcagacttcgacgtctga

SEQ ID NO: 140 - DNA, 444 bp, Gossypium hirsutum
  Clone ID: LIB3493-026-P1-M1-C1
agaaaatatcacaaatcttcttctccttctcagaaatcttagtatcatcactatggcctcaaatcccaaggtcttctttgacatgacgatcggtggtcagcccgctggtcggattgtgatggagcttttcgcagattgcactcctcgcactgcggagaacttccgtgccctctgtactggcgagaaaggcgtcggccgcagcggtaagcccctccactacaaaggctcttctttccatcgtgtgatccctaactttatgtgccaaggaggtgacttcaccgccggaaacggtaccggaggtgaatccatctacggatccaagttcgctgacgagaacttcatcaagaagcacactggtcccggtattctctcaatggctaacgctggaccgggaactaacggatctcagttcttcatttgcacggctaagactgagtggctcga

SEQ ID NO: 141 - DNA, 231 bp, Gossypium hirsutum
  unsure (1)..(231): unsure at all n locations; Clone ID: LIB3493-026-P1-M1-C10
gctagcaggcccacagctggttcagatgtttattggagatggagcaaaacttgtccgtgatgcttttcagcttgcaaaagaaaagtctccatgcatcatttttatagatgaaattgatgcaattggcacaaagcgttttgatagtgaggtgagtggggatagggaggntnttngaacaatgttggaactggttaaccagtttgatgggtttagcagtgatgatcgtattaa

SEQ ID NO: 142 - DNA, 476 bp, Gossypium hirsutum
  Clone ID: LIB3493-026-P1-M1-C11
gcccttgctggcacggttgatattgactttgacaaggagccaattggaactgggaaggatggtaagagtgtctatttcaaggacatctggccttctactgcagaaattgcagaggctgtccaatccagtgtcttgccagagatgttcaaaagtacttacgaggctattacaaagggcaatcccatgtggaatcagctatcagtgccttctttcactatttactcatgggaccccaactcaacctacattcatgagcctccatacttcaagaacatgaccatggagcctcctggagcccatggcgtgaaagatgcttactgcttattgaactttggtgacagtatcacaacagatcacatttctcctgcaggaagcatccataaagacagtcctgctgcaaaattcctacttgaccggggggtggagcgcaaggacttcaactcttatggaagtcgtcgcggtaactatgaaatgat

SEQ ID NO: 143 - DNA, 233 bp, Gossypium hirsutum
  Clone ID: LIB3493-025-P1-M1-H1
tggattgttaacaagctccttgctatgtctgctcttcacttggctcctgcttcaggctttcaactcatttagaaatggacgtaaatcaagccaacgcaagctcccacctggtccatgggctaagccaatcatcggcaatctcttcgatcttggggataaaccccacaggtcttttgctaagtttgctcagattcatggccccgttatgggtctcaaactcggcagcttaatca

SEQ ID NO: 144 - DNA, 451 bp, Gossypium hirsutum
  Clone ID: LIB3493-025-P1-M1-H10
cagccaagttgcttatttcggaatatggattagatgcatcgtcattgaaggcatcaggtcctcatggtactttgcttaaaggggatgttttggctgcaattaagtccggaaaaggatctcccaaaatttctccatctgaggagtcaaaaccatcacctcaaaccagctctcagaaatctccttctgcgaggcctgagtcaaaggctccccagcaatcagattcttttgaagacttgcccaatactcaaatacgcaaggttattgcgaggaggttattggaatctaaacagactacgccacatttgtatttatcttcagatgttgtactggatcctcttctttcttttaggaaggagcttaaagagaagcatgatactaaagtttcagtcaatgacattgtcataaaagcggttgcagttgctctaaaagatgtacctgaagctaatgctta

SEQ ID NO: 145 - DNA, 391 bp, Gossypium hirsutum
  Clone ID: LIB3493-025-P1-M1-H11
cagagttaatctagtaaacaatcaaattctcagccacttcgtcatcaaatgcctgaatttcattggagaaagtaagaaaaatggcaatgatcccaagattctttggcaatcgaaggagcagcatcttcgatgatcccttctcctttgacatattggatcctttcaggggcttccctctgtcttcttcgtcactcaccaccacgcctgtcccagaaagcgctgcttttgctaacaccagaatcgactggaaggaaactccggaagctcatgtcttcaaagccgacctccctgggcttaaaaaagaggaagtgaaagtggagattgaagatgacaggatgcttcaaatcagcggagaaaggaaatttgagaaggaagacaagaacgacacttg

SEQ ID NO: 146 - DNA, 347 bp, Gossypium hirsutum
  Clone ID: LIB3493-025-P1-M1-H12
gagcgatttgggtttggccagagatttcgaaatcatcggatgcatggcttgccgtattaattttaatctccggtgtccttcctgccatacgccgcgtttcgtgcccctcaaaaaccctacgctccttattcctccttttaaaccccactcccatacccaccccaggcatccctttaagctctctatatccacttatcagaggctgtggaggcgacggatgggctttgtgacacgtcaattctcatatggccaccgaggaaaagcctatttccgatgatagaatgctggtgtttgtgcctccacatgcgttaattaagcactggagttcggttttgagaaatgaacaa

SEQ ID NO: 147 - DNA, 143 bp, Gossypium hirsutum
  unsure (1)..(143): unsure at all n locations; Clone ID: LIB3493-025-P1-M1-H2
cttctctagaggtctggtctactcaacactctctcctncctcttagcaaccaaagactcagatccgctcggatntctttggtccagaactagaatggagacctttctattcacatcnagagtccgtaacgagggacaccctga

SEQ ID NO: 148 - DNA, 114 bp, Gossypium hirsutum
  Clone ID: LIB3493-025-P1-M1-H3
tggactattgtatgcatgacttacaaataccgtacctgataactgctagataccgaaaggataaactttatgcggagtctctagctcgtttcaaggtggatctgcatacatata

SEQ ID NO: 149 - DNA, 171 bp, Gossypium hirsutum
  Clone ID: LIB3493-025-P1-M1-H4
cggacgcgtgggttcgagaccagtttccgggagccaatgattttggaagtgaaataattccaggtgctacttccattgggatgagggtgcaagcttacctgtatgatggctactgggagacattgtacgattgagcatttatacgcaattggaatacaaagcaggcagatt

SEQ ID NO: 150 - DNA, 242 bp, Gossypium hirsutum
  Clone ID: LIB3493-025-P1-M1-H5
ggaagtctaaaatcagatcaagtaaacacctttgacagtgaacacccccgcccaccataaaattacaatgaggtatatccagttttcaatcaatataatggagtgacatctttaattctggcctttttcttttcttcttctgtcttcttttcaactagttcgccgtatgtaaattattttacattgttataacacaatgttcagtagctggttatctggtcgacaagtcttttaaattttac

SEQ ID NO: 151 - DNA, 412 bp, Gossypium hirsutum
  Clone ID: LIB3493-025-P1-M1-H7
cgcgtttctatggacgtcataaccgaaatctataacctcgaccgcgacggttctaaggattacctctccgccggccagacacagctcccttctctttacaccgtcttctctgtcctctacttgttcttcttagcttattgggtctacgtttgttacactaacagacgatgcgtacaccggatccatttattaatgtccgggttgctcttattcaaagctttgaatctgatctgcgccgccgaagataagcattacgttaaggtttccggaacacctcatggttgggatgtttgttctacattttccagcttattcgtgtagtttgttatttactggcatcgtcttgatcggcaccggtttgtcgtttatgaaaccctttttgcaagaaaggggagaagaaggtcttgatgat

SEQ ID NO: 152 - DNA, 429 bp, Gossypium hirsutum
  unsure (1)..(429): unsure at all n locations; Clone ID: LIB3493-025-P1-M1-H8
atttaactctcccatcgcactagtttttctctcgttgacattaccataatcacactcaaaagcttccttgattttttttttttgttttgttttggcgatgcaaaggttaaggagctggtcgagtgacgttgtgcagcttgatctaagtccactgccaccaccacaacctcctccttcttcctcaaacaacacccccatgagcaccacagccatcagcggcgccggcttttccatagacgaggaggagccaacggaggcacgaatcaggaggttgatatcggagcacccagtcatcatcttcagccgctcctcctgttgcatgtgccatgtgatgaaaaaactcttagccaccaatcgggttcacccaactgtcatcgaactcgatgacccatgagatcgcttncctccctccgcctcctgcccacgata

SEQ ID NO: 153 - DNA, 162 bp, Gossypium hirsutum
  Clone ID: LIB3493-025-P1-M1-H9
tatttgccatcaataagtgaaaaaagtgaaatacaatgctgaactccattcttgtacatgattatattgcaagtgaatgtaaactgtgtttaatgaaaacttgtaaataaattgaactattgtttatggtttgtgctattgaagtaagaaataatccgaagc

SEQ ID NO: 154 - DNA, 279 bp, Gossypium hirsutum
  unsure (1)..(279): unsure at all n locations; Clone ID: LIB3493-026-P1-M1-A1
ctctcactggtcccttcgatctctgttccttgtcaccaaaaaacatctgtctgggcaatgcaatcctcctttttctattcaaccataatgtgttgcttcattagcaaattcacggatgagacggctaaagacgctgcttacattggcacccctggaaagggtatgcttgctgctgatgaatcacaccggcaccatcggcaagcgtatttaagcattaatgtacaaaatatcgaagaaaacaggcgtgctgtactngagcttctcttcactgctccagga

SEQ ID NO: 155 - DNA, 450 bp, Gossypium hirsutum
  Clone ID: LIB3493-026-P1-M1-A10
cttgtcggtggattatggtaaaaagtcaaagcttggtttcaccatctacccttcaccacaggtctcaacagctgttgtggagccttacaacagtgttctgtctactcattcccttcttgagcacactgatgtggctgtgctcttggataatgaagcaatttatgacatatgccgtcgttcccttgatattgagaggccaacttacactaacttgaaccgtttgatatctcaaatcatatcatccttgacaacttctttaaggtttgatggagctatcaatggtgatgttactgagttccaaaccaatttggttccatacccccgtatccatttcatgctctcttcatatgcacctgtcatctcagctgagaaagcataccatgaacaattgtcggttcccgagatcacaaatgctgtgtttgagccttcaagcatgatggcaaaatgtga

SEQ ID NO: 156 - DNA, 450 bp, Gossypium hirsutum
  Clone ID: LIB3493-026-P1-M1-A11
atgaaccgaaagaacagggttgagaatttcaaaaatgcatctggattgaaacctgtaaatactggtttaaaagcaggggaagctgggtatgatccattttcgaggaggtggactagatcaaggaactactataatgcaaaggctcctggaggagatgcggcagcggtagctaatggtgacacaaacggtgcaattggcagtggaaatggcaatgatgcaggggctgctgctgctgaggctggcagggcagccacagcagctgcctttcaagaagctgcaggtgcggggaaattggtgacacaaatgcccctgtcgatgaagggacagaatctaacatgctacatgactttgagcttccgatctcattggacgtgctttcggaagttcggtggtcacaaggggcccgcggggctggattcatggccaggaaacaaaggatagaagcaaccg

SEQ ID NO: 157 - DNA, 337 bp, Gossypium hirsutum
  Clone ID: LIB3493-026-P1-M1-A12
ctttttcaccaactcctctcccgttttcttgctctttttcttcctttgcatttacttctgatttgtaggttccttttttccgattcccttgagtaatcaagctttttgtttatttgttttactttctgggttttccatcctgtttcattgcttgcttatattctatatgtatatattcttcaatagccatggttatttgagttggaattctgaatgcactggaacacttttttttctcttaaaaaaaaactcagagaccagagaaggcaaaaagcaaaccaatccttttccccccagtggatcccaccagcactacaaccatgattgtgaatgtgaa

SEQ ID NO: 158 - DNA, 499 bp, Gossypium hirsutum
  unsure (1)..(499): unsure at all n locations; Clone ID: LIB3493-026-P1-M1-A2
gacggacgcgtccacccacgcgtgcgttaaaagaggtattctcacattgaaataccctattgaacatgggattgttagcaactgggatgacatggaaaagatctggcatcacactttctacaatgaacttcgtgttgctcctgaagaacaccctgtgcttcttactgaagcacctctcaatcctaaggccaacagggagaaaatgacgcagataatgtttgaaacgtttaatgttcctgccatgtatgttgcaattcaggcagttctatccctttatgctagtgggcgtactacaggtattgtgctggattctggggatggagtcagtcacactgttccaatctatgaaggttatgcacttccccatgccatcctcaggcttgaccttgctggacgagatntaacagatgctttgattgaagatcctgacagagaggggttacttatttaccaacatctgctgaacgagatattgtacgcgacatcaaggagaaacttg

SEQ ID NO: 159 - DNA, 465 bp, Gossypium hirsutum
  Clone ID: LIB3493-026-P1-M1-A3
gctttgagaactttcttgttacggaagcttgacaatctttcaaaggatgacaaatgccaaataacaatgatttccacatgggccacagaactgtacctggacaagataaatcggcttcttttagaagatgacacagctttggtgaatcgtaattctgaatatcaatcaatcattaaagaattccgtgctttccttagtgactgcaaagatgttttggatgaggtgactacaatgagacttctagagagctatggaagagttgaagaactagtatatttcgctagtctgaaggaacaacatgaaattgttattcattactatattcagcaaggagaagcaaagaaagcattggaagtgcttcggaaacctgctgttccaatagatcttcagtacaagtttgccccagatcttattactcttgatgcttatgagacttgggagttttggatggcgtctaacaacctg

SEQ ID NO: 160 - DNA, 364 bp, Gossypium hirsutum
  Clone ID: LIB3493-026-P1-M1-A4
tccatccgttgcttcagctccaccggtgaagcatctaatgtagacgaatacctatggttgatggggagagcttgctacaagcctgtcattgaatattgtggtggcactgaaattggtggcggttttgtttctggatcatttctacagccccaatctttagctgctttcagtacttcagtcatgggttgccgtttgtttattcttggcgacgatggccattctattccagaggatgcaccatggatgggggaactggtccttggtcctcttatgttaggttcttcaagcacacttcttaatgtcattcactacgattgttttttttttgaaatgcctttttggaattgtttgtatttcctattgt

SEQ ID NO: 161 - DNA, 401 bp, Gossypium hirsutum
  unsure (1)..(401): unsure at all n locations; Clone ID: LIB3493-026-P1-M1-A5
gcaattcctttagtgaaaaagcaaagggtggtggaaatctgcgactccaggattccatttccgatgtacatggaaagcagaataaggagaatattaagcgtggcatcacgttgttcatctgacaaggaagagcaccgtccttcaatcggagaaatcattgtggcaatggagacttgttccattgaaccggtcagaagtataacagcctggaatagcgtcatacagtacttggttcaactcaagaggcggcgaaagctgagtggggaatattgcagaaggtcagccgtttattcaacccgacaagatgaagatgttaatagccatgtttcgacggggaaagtagtgctgctgaaggagatgttagcagatgttagattgaaatgangtttgttgaagctgag

SEQ ID NO: 162 - DNA, 457 bp, Gossypium hirsutum
  Clone ID: LIB3493-026-P1-M1-A6
ggaaaaagaagcttcaatctttggttgttaagtgggtgaaacaaaaaaaaaaaatggagggcaaagaggaggatgttaagctaggagccaacaagttctctgagagacaacctattgggacatcagctcaaacagacatggactacaaggtgccaccaccggcaccattgtttgagcctggtgagctcaagtcatggtctttctacagagccggaatcgctgagtttgttgctaccttcttgttcctttacatcactgtcttgactgtcatggtgtctctcaatctaagaccaaatgtactactgttggtattcaaggcattgcttgggcctttggtggcatgatctttgctcttgtttattgaacccgctggcatttcaggtggccatattaacccagctgtgaccttttgggtgtttactggcaaggaagctgtcctttacatgggcagtttttt

SEQ ID NO: 163 - DNA, 393 bp, Gossypium hirsutum
  Clone ID: LIB3493-026-P1-M1-A7
cgcctctcgcttattggttcaagatctggttttgatctgatcagatcggataaaaatatcaaaacatgtttgggagagcaccgaagaaaagcgataataccaaatactatgagattttgggagtatcgaaaaacgcttctcaagatgatctaaagaaagcttatagaaaagccgctattaagaatcatcccgataaaggcggcgatcctgaaaagtttaaagagttggctcaagcttatgaggtgctgagtgacccggagaagcgtgagatttatgatcagtatggtgaggacgcccttaaagaagggatgggcagcggtggcaggggccatgaccctttcgatatcttccaggaattctttggtggcaatccttttggtgctgggggaagca

SEQ ID NO: 164 - DNA, 481 bp, Gossypium hirsutum
  unsure (1)..(481): unsure at all n locations; Clone ID: LIB3493-026-P1-M1-A8
gcagctcagtgccaccacaaggtgtattgggcttgggccggggcccattatccctcctttcccaatcccaaaatttgtaccaatcaacattttcatattgcttgcctagcattaggtcacctaacttttctgggtcattgagacttggaccaagtgggcaacccgtgaggatcaaatacaccccgttgcttaagaaccctaggaggccctcactttattacgtcaatttgattggaattagggttggaagaaggattgttgatatcccaccaagtgccattgctttcaatccttccactggtgctggcaccattattgattctggtaccgtcttcacccggctagttgagccagcctatgtagctgtccgggacgcattccggagacgaagtaaggtggcgaacgtgacatcttttggtgggttcgacacatgttanctcgtcccaatcaatgcaccgaccataacaatttatgttttcgg

SEQ ID NO: 165 - DNA, 397 bp, Gossypium hirsutum
  Clone ID: LIB3493-026-P1-M1-A9
ccacgcgtccgctgagttggctaaaatatgtggtttcattgccgcggatgaaaagcggcacgagacagcctataccaacttactgacaagctgtttgaggtagatcctgacgaaaccgttcgagcctttgccaacatgatgaggaagaaaatcacgatgcctgcttacttgatgtacgatgggcaagacgaaaaccttttcgaccacttctcggctgttgcacaaagacttggggtttacactgcttccgactatgctaatattgtggagttcttggtggatcgatggaacgcgaaggaattaactggactttcagctgatgggcgtaaagctcaggattttgtatgtaatcttgctccaaaaattagaaaattggaagagagatttcaattaagag

SEQ ID NO: 166 - DNA, 397 bp, Gossypium hirsutum
  Clone ID: LIB3493-026-P1-M1-B1
aggaaatcgcgcaaattttatcgtcttccactcaaaacaaaacagaagagaatctaccatggcgcccaaagccgagaagaagcctgctgagaagaagccggccgaggagaaaaagactaccgtcgctgagaaatcccctgccgagaagaagccgaaggccggtaagaagcttcccaaagaaggcggtgcggccggagacaagaagaagaagaaggccaagaagagcgtggagacctacaagatctacatttttaaaggtccttaagcaagtccatcctgatatcggtatctcaagcaaggctatggggatcatgaacagtttcatcaacgatatcttcgagaagcttgctcaggaagcttctagactcgcgaggtacaacaagaagccaacgattac

SEQ ID NO: 167 - DNA, 484 bp, Gossypium hirsutum
  Clone ID: LIB3493-026-P1-M1-B10
caattgctgataacatgtctcttgtttggaatgagtatggttgggacagggcttctaaccttctgtatgtggaccaacctattggtactggctttagttacagttctgaccgaagggacattcgtcataatgaagatgaagttagcaatgacctatatgatttcttgcaggcattctttgcggagcaccctgagtttgcaaagaacgaattttttataactggagaatcatatgctgggcattacattccagcttttgctgctcgagtccaccgtggaaacaaagccaaggagggaattcatataaatctaaaggcgtgttactaattatatgatcttttacatgttactttctaatttcttgaagctacaacttgtatggaattatttctttttgcttacttcaactttaaagtgggtaacaaggaattgctattggtaatggtctgactgaccctgtaatccagtataaagcttacacaaat

SEQ ID NO: 168 - DNA, 504 bp, Gossypium hirsutum
  Clone ID: LIB3493-026-P1-M1-B11
cagagtgggtcatggattcgaccttcatcgtttggagcctggctaccctttgatcattggtgggattgatattcctcatgatagaggctgtgaagctcattctgatggagatgtactgcttcattgtgttgtggatgcaatattgggaggtttagggctacctgatatagggcaaatatttccagactctgatcccaagtggaaaggagctccatcttcagttttcattaaagaagctgtgagactcatgcatgaggcaggttacgagattggaaacctagatgccaccttaattcttcaaagaccgaaactgagtccacacaagggagttatcaaagccaatttgtctgagcttctaggcgccgacccatctgtcatcaatcttaaagccaagactcacgagaagggtgacagccttggtgagaatcgaagtattgcagcacacactgtggtcttactcatgaggaaagaaaatctggattcgaatagcattggtgtttactg

SEQ ID NO: 169 - DNA, 316 bp, Gossypium hirsutum
  Clone ID: LIB3493-026-P1-M1-B12
tgttctgagtgatccccaaaaacgggcggtttatgatcaatacggagaagaaggattaaaaggccagatgccgcctccaggtgcgggaggttttggaggcggttacagtggtggtccaacgacgttccggttcaatactcgcaaccccgacgatattttctcggatttttttgggttttcgagtccgtttgggatgggtgatatgggtgggccagaagtggcgactaggttccctaggggaatgtttagtgaagatatattcggctcgtttaggggtggtgctggtgagggttttaccactatgcctcgtaaaggt

SEQ ID NO: 170 - DNA, 455 bp, Gossypium hirsutum
  Clone ID: LIB3493-026-P1-M1-B2
gtaatgaacctaattggtgacgtaaaaggaaaagttgcagttatggtggatgatatgattgacactgctggtgagtgaaagcaatgtgaagtgagcaaacataaacctgttctcaatcacaaatacacgtgtaacttttgcttatccttatgtattcaatggtcaaatggtggcaaaaaactcgtttcttgcaccttttttgttttctctttaaagttctgttctcgtcatcttttgtgaagtactttcttatccttttggagaaaatacttccatcaggattgtccatggctgccttgaaaattgtctttattgatcatcagctgtgttatcaatttaaactatgttttaccaggaacgattgcaaagggggcagcactgctacaccaagaggggggcgagggaagttatgcatgctgtagtcatgcagttttcagcccttctgcaataaatag

SEQ ID NO: 171 - DNA, 498 bp, Gossypium hirsutum
  Clone ID: LIB3493-026-P1-M1-B3
gcgacattcatagcagctcgcatcttcaggaaggccgcggtctctgctagctccgctcaccgtgacgtaatctcatcccgctgtttcgccacggagtcggcgaaaacgatctcgccgtcgacggatcgagtcaagcgggactacaggggccaaaggaagataatccctctcggacagtgggtccctaaggtcgcctgcgacgcttatgtggcacctaatgtcgtcttggccggtcaagtaaccgtctacgacggagcgtcggtgtggaacggctgcgtcctacgtggcgatctcaacaagatcaccgttggattctgctctaatgtccaggaacgctgcgtcattcacgccgcttggtcctcacctaccggactttcaagcggggacttaattcgaggagttcgtgacaattggtgcatacagtcttttgagggcatgcacaattgaaccggagtgcattatcggacagcattctattctcatggaagggtccttggt

SEQ ID NO: 172 - DNA, 395 bp, Gossypium hirsutum
  Clone ID: LIB3493-026-P1-M1-B4
ctctcatacttcactctaacattccctttgaggttttaggaaaacagcagagaaattaaggaatggagaccttcctatttacctcggagtctgtgaacgagggacatcccgacaagctatgtgatcagatctctgatgcagtcctcgatgcctgtttggcacaggatcctgagagcaaggtggcttgcgagacctgcagcaagacaaacatggtgatggtgtttggtgagatcactaccaaagccaacgtagactacgagaagatcgtgcgtgacacctgccgtggcatcggtttcacatctgacgatgtgggtctggatgctgacaactgcaaagtgctggttatcatatatcaacaaagccctgatattgcccaaggtgtccatggtcatctt

SEQ ID NO: 173 - DNA, 499 bp, Gossypium hirsutum
  Clone ID: LIB3493-026-P1-M1-B6
cttgaagtgaacgacgaaacctatgagagtattgccactatagctgaacgtagctgggcactgcaccacaagagagccttatcatcggcctgacatgggccatgttgtgaatgtgctatcacctttggttgagaagtggaaacccgttgatgatgaatcagagtgttactcgggcatagattacactcagccacttccccagatgttgaaggtttggcaggctgctgaaagccaaggcgtgagctatacaagtctggctgatagcaaaagaagcattccagccaaagcctgccggatttgcagactccttcacatcggttgatggtcgatgatggaaggtaaaacctacattctacacaaggaataagttccccatcttggtaccatgatatacatggttcagtgcttgagggctactttttatgtaatttgagttattttacttgtggtttttcaagtcgtggaacatgtctttcatggtagtgtagatagagagata

SEQ ID NO: 174 - DNA, 367 bp, Gossypium hirsutum
  unsure (1)..(367): unsure at all n locations; Clone ID: LIB3493-026-P1-M1-B7
caggaaacagcagaaggtgactgtaacgggatatgttgaagctaacagagtgttgaagaaagctaagtcaacagggaaaaaggctgagatttggccttatgttccttacaatctggtggctcaaccttacgctgttactgcttatgacaagaaggcacctcctggttatgttaggaaagtagacaacaatgtaagcagcactgctaccgtcactagatatgaagaatccttacataaccatgttcagtgatgaaaacccaaatgcatgttctgtcatgtgaagctgcaattttatattactatttctttttggttntctctgttggatttcctggtagatattatgacaagattggcgagttattac

SEQ ID NO: 175 - DNA, 340 bp, Gossypium hirsutum
  Clone ID: LIB3493-026-P1-M1-B8
atttcgcacaaaaatgaaatactgaaatctcggacttgtttcaagcgcgcgcttctttccccattttccttcccatcattcttttttcttataattggacaaaacattgtcacactcttcttccttctccctttcacgtttccttaattaacggaatttttcaacatgttctacagaggtaaatatactgatggtgctgatgggcgtgaaaatgggtgcaaagcgtcagcggataattgatcaaggcccttcattctatggaaactctccaggttcaagcttcatgtatactgcccctcctcctccttactcatatgttagccaacctccacctttcctg

SEQ ID NO: 176 - DNA, 241 bp, Gossypium hirsutum
  Clone ID: LIB3493-025-P1-M1-G6
gtgacttacagtctgatgattttggaattagtttttggtacgtaaatgaccttggaagtgtaagtaacgcagaaaggcaagacaggagatgagtgatatgagacaacctggacaaaactcgtggtgtttggctgtcagattggagagtcagaagaacattcaacattgataatggtattgaatctattggatttgtggttacagacagaagagtgcatgatatattatgtgatttttgaca

SEQ ID NO: 177 - DNA, 377 bp, Gossypium hirsutum
  Clone ID: LIB3493-025-P1-M1-G7
ttatctgccaaacttcatgcggaatgcagttcttgatcatagaatcagcgatctgtatcatccagacctacttctgaggaacaacaatgataagggaaatccggttactgaagaatccattcttaaattctttcagcttgccatgacttgttgttctccttctcctactcttagaccgaatagcagacgagtgctcatgatgctcgaagaaatcgggaagtaggaactggtagtagttcattcttcattggtcttggtcggagtttctaaatttacattttgttaatcacctttgacggtcatggtaataatgttaacaacaaaaacaatgatttataccggaatagcaggagtagggtaatcttttgaaagctaaa

SEQ ID NO: 178 - DNA, 403 bp, Gossypium hirsutum
  Clone ID: LIB3493-025-P1-M1-G8
gttccattgagctcgccttgaggtggttaagtttcatgggttcatcggggattagaacaaataatttcatagttaggcagttatttgaatcatgcatgaagaatggtttatatgagtcagcaaagcctctccttgaaaactatgtgaactctgctgcgaaggtggatctgattctttacacatcaattcttgcctatttggtacgatgccaggaggaacacaatgagagacatttgatggcaattcttggtgcaacaaaacacaaagctcatgcctttatgtgtggactacttactggcccagaacagagaaaacagccagttttaatcgttggtggaggagtttttcaaggtattgattacgagttggaagaaggggcttgcaggtactttgtcaatgttct

SEQ ID NO: 179 - DNA, 330 bp, Gossypium hirsutum
  unsure (1)..(330): unsure at all n locations; Clone ID: LIB3493-025-P1-M1-G9
gggcctacaaaatggtctgtcattgctaaatctttgcctggacgaatagggaaacaatgccgtgagagatggcacaatcatttgaatcctgatataaagaaggatgcttggacgttagaggaggaattggcccttatgaatgcgcatcggatatatgggaacaagtgggctgaaatagctaaagttttacctggaagaactgataatgcaataaagaatcactggaatagttccatgaagaagaagttagatttctatttggctacagggaagcttcctccagttgtgaaaattgttcttaaaaatgagactaangatatagaaacacct

SEQ ID NO: 180 - DNA, 296 bp, Gossypium hirsutum
  Clone ID: LIB3493-025-P1-M1-G12
ttcaaattcagtttgcttggctgtggaataggtacagttggcagaggtgaaagcttgaagaaggttggctaaagggggggacttaattagttggcaaaaaataacaaattgggaagttggaaaagctgctcagaccaacatcatattatctgatctgtaatttccaatgtatattttttttatgaaaccagaaaattattgtttaattaatatttattcttaactagatgtttcatagcattttttcattatcttttatctacatctaagctggtcttatggacttttaggaagag

SEQ ID NO: 181 - DNA, 217 bp, Gossypium hirsutum
  Clone ID: LIB3493-025-P1-M1-G2
ccctgtcattgtttccacagggcagacttatgaacgttcttgcattgaaaaatggctggagcaaggtcatggaacgtgttccaagacacaacaaacccttaatagccctggttttacgcccaattatttattgggtagtctaataactcaatggtgtgaggccaatggcattgagccggctaaaagaccccggaggtctcgatccaataaaaccaca

SEQ ID NO: 182 - DNA, 244 bp, Gossypium hirsutum
  Clone ID: LIB3493-025-P1-M1-G4
cttttggaagctgaacttaatcaggctgaaagcagtgggctttacactggggatggctccgctgacttcaatgggaatcctattttgaagcagaatactggaaattggagagcgtgccctttcattttgggtaatgaatgctgtgagagattggcttattatgggatagcaactaatcttgtaagttacctgaccaagaaactgcatgaagggaatgtatcagcttgcagaaatgtaactactt

SEQ ID NO: 183 - DNA, 130 bp, Gossypium hirsutum
  unsure (1)..(130): unsure at all n locations; Clone ID: LIB3493-025-P1-M1-G5
ctcaaaatctgagcaaaacccagatgttaaaaagtggtaatctgttctgggtatttgttgtttttttaagattttcttttatgtttgatttaaatctgatgtntgggttttgattgtgtcttttggtctc

SEQ ID NO: 184 - DNA, 387 bp, Gossypium hirsutum
  Clone ID: LIB3493-025-P1-M1-F8
cggacgcgtgggtcaaaaccaaataaaaacatggcaccacaccttaatattgttccttccatgtttgtgcttttattattattcatttcagcctctaaagttcaatcaggcgctattgatgttgttgccaagtttggcgcaaaagctgacgggaaaacggatttgagtaagccatttttggatgcttggaaagaagcatgtgcctctgtaaccccatcaacagttgtgattcctaaagggacatatttattatcaaaagtaaacttagaaggtccatgcaaggctcctattgagattaatgttcagggcactataaaggctccggctgatcctggtgctttcaaagaccctaattgggttagattctatagtattgaaaatttcaaa

SEQ ID NO: 185 - DNA, 428 bp, Gossypium hirsutum
  Clone ID: LIB3493-025-P1-M1-F9
cggacgcgtgggtcaaaaccaaataaaaacatggcaccacaccttaatatgggtccttccatgttagtgcttttattattattcatttcagcctctaaagttcaatcaggcgctattgatgttgttgccaagtttggcgcaaaagctgacgggaaaacggatttgagtaagccattcttggatgcttggaaagaagcatgtgcctctgtaaccccatcaacagttgtgattcctaaagggacatatttattatcaaaagtaaacttagaaggtccatgcaaggctactattgagattaatgttcagggcactataaaggctccggctgatcctggtgctttcaaggaccctaattgggttagattctatagtattgaaaatgtcaaaatgtccggcggaggaatgttcgatggtcaaggatgcattgc

SEQ ID NO: 186 - DNA, 414 bp, Gossypium hirsutum
  Clone ID: LIB3493-025-P1-M1-G1
ttatctgccaaacttcatgcggaatgcagttcttgatcatagaatcagctgtctgtatcatccagacctacttctgaggaacaacaatgataagggaaatccggttactgaagaatccattcttaaattctttcagcttgccatgacttgttgatctccttctcctactcttagaccgaatagcatacgagtgctcatgatgctcgaagaaatcgggaagtaggaactggtagtagtttatttcttcattggtcttggtcggagtttctaaatttacattttgttaatcacctttgacggccactgttataatggtaacaacaaaaacaatgatttataccggaatagcaagagtcgggtcatctctttaagctaaaaagtaagaacattgtgttgatactcgtggagaaagag

SEQ ID NO: 187 - DNA, 439 bp, Gossypium hirsutum
  Clone ID: LIB3493-025-P1-M1-G10
ctaaagtgcttaatcatagggagatctccaagttctccagacgagatgccgatgcttatccgaaatatgagagtcaattagagagattctgtacactcatggatccacttttggattcatcgcctcctgaatctttgcaaggtatttcatctctccaagagcgtctcaagaataaagtacacaactcggtattttggactcgtttgctgcaccaggctgcttccttgggggaaagacatggtggattttatggatcttttattgtccccagcttcgcaggttttgaataactggtttgagacagatgttctgaaggcaacccttgcaacagatgctgtgatagggagtacggcgagtgtcaacacaccagggagtggatatgtactgctgcatcatgtgatgggagaaactgatggtgatcgtggaatgtggtcatatg

SEQ ID NO: 188 - DNA, 464 bp, Gossypium hirsutum
  Clone ID: LIB3493-025-P1-M1-G11
cttctcttcaactccacctgctgaaatgcaccaatttccggcgcttctcagcctcatcgcagtgtctgtactgctgatggtaactacagtcatcggataccgaccatggcctcacttaaaacccaacagctccgatttaacgtttggaagctccaagaaatccgagggctcatcagagtccgtccaaatgagataccatatgggaccagttctcaccggcaacatcaccgtacacatagtttggtacggacgatggcaaaaatgtcagaagaagatcatgcgtgagttcatcaactcaatctccgacgttgatgccaagcgcccttctgctgccggctggaggaagaccgcacaactttataccgaccaaacggtcgccaacattctccatactgtgcatttaggggaagagaagaacgaccgatgttactcgcacgggaaaatactgacgcgcttgtcgatac

SEQ ID NO: 189 - DNA, 391 bp, Gossypium hirsutum
  Clone ID: LIB3493-025-P1-M1-F11
gttttctctgtttgccatttgccttaatcatcttcctctttctttaaaacttcttcctatttaatttctgactaaacttgcgctgaattccatggctactgcagaggttgtaacagctcaaactgcaatccatgaggagaaacctgaagaagtggtcaaggttgaagaaattgcaacagaagaggtagtggctgttgctcctgcaacagaacctgttgctgaagaaccaaaggaaccagtgcctgaagcagcatccgaagaaccccaggctccagaaactgaagccacagttgaaactgaatcaaaggaggtggctgaagagcccaaggctgtgactgaggagccagaagttgagaaaaaagaagaagagactcctgaggaaacagtatca

SEQ ID NO: 190 - DNA, 82 bp, Gossypium hirsutum
  unsure (1)..(82): unsure at all n locations; Clone ID: LIB3493-025-P1-M1-F12
caaaaaagcttgtttttgattntaaaatataaactcacgacatctagaaatggtgacctcagtgctacctagagtagaaagc

SEQ ID NO: 191 - DNA, 58 bp, Gossypium hirsutum
  Clone ID: LIB3493-025-P1-M1-F4
ccggaactggggtcaaaactggcaattcaacgtcgttgtactctgacagcgctgacgt

SEQ ID NO: 192 - DNA, 389 bp, Gossypium hirsutum
  unsure (1)..(389): unsure at all n locations; Clone ID: LIB3493-025-P1-M1-F7
cggacgcgtgggcttcagtcgagaatgaggccaaggttagaacaacatcattgcccgacgagagtcttttaaggatgatctccaccttctctgcctccggtactgcagatccagacgccttgagcaacgcgcaggtattctgtattttagcaacatattatttgacagacattacccctttcttgagcatcgagattcggagttaaaaactccatctgaagaagagacaaatcaaggcaaagcaggtaacgtcccttctaaatatccnagcagttcatatccttcaattattaatcggatatgctgttgccattgcacaaaatttccttcatccaactttaccgtatcatgacgaggaaacgtctgaaccaaacgagagctggagaacg

SEQ ID NO: 193 - DNA, 432 bp, Gossypium hirsutum
  Clone ID: LIB3493-025-P1-M1-E8
cggacgcgtggggtttcagatcttcccgttttacccccatcgccgtcacggccgccatcaaccacaatcgccacttggtttcccggagtttcttctctatctcatcgcctatcgcccctaatccgcctagaaacaccccttctggtgggaggtcgtcctttgcgttgagatcgggaagcatgcgctattttagtgaagatgcagctcatttgcctgacataaacgacactgagattctgaatgttttcaaggacttaatggctgcaagttgggatgagcttccctattcggttgtacaagatgcaaagaaagccttatcgaaaaatactgatgacaaagccggtcaggaagctttgagaaatgttttccgtgccgcttgagcctgttgaggagtttgtggtattctaatcaccatgaaaatggaactcgatg

SEQ ID NO: 194 - DNA, 313 bp, Gossypium hirsutum
  Clone ID: LIB3493-025-P1-M1-E9
ggccgctcgaacaaggagcgcaaatcttttgatgagaagtttacccgaatggacacaaagaggctctgtgagttgacatctgccgctgacagccttcagttaaagcctctagttgatcttactagtcgtgcccttgcacgaattattgaagggaaagctcctgaggagatacgtgagatatttcatttgcctgatgatcttactgaggaagaaaagctggagcctctgaaaaatgccaccgatgacccacgcattcgactgttaaatagattgtatgcaaaaaagagaaaggaactaaaagagagggagaaac

SEQ ID NO: 195 - DNA, 167 bp, Gossypium hirsutum
  Clone ID: LIB3493-025-P1-M1-F1
atttttcgatcgatgcccaaatagaaaaacacaagtttgaaagctattactcaaatcttgataatcggaaatgtaagcttgtatctctgatttatctgcccatttactctgtatttttttaataacagatctcgcatcaactttaaccttcactttcctaacctcca

SEQ ID NO: 196 - DNA, 440 bp, Gossypium hirsutum
  Clone ID: LIB3493-025-P1-M1-F10
caaaatccccaaaaaaatattaaaaaaaatgagctctcagattttcagatctgcttctagagccgccaggtctctcctttcagcatccaaggcttctcgcttttactctgaagggcgagctgtagctgccgctgcagcagtttcacttggcggtaaagtgcctcttttggcttcagcttatggaagtactgcttctgccaatgcatctagagcatggctttcaggagtttttgctcttccagtggcagcttacatgcttcaggagcaggaggttcatgctgcagagatggagcgcaccttcattgctatcaagcctgatggagtgcaaagagggctgatttcagagatcatctctcgttttgagcgcaaagggttcaagcttgtggctatcaagttggtggttccttcaaaggagtttgcccagaaacattatgatgact

SEQ ID NO: 197 - DNA, 408 bp, Gossypium hirsutum
  Clone ID: LIB3493-025-P1-M1-E7
cgaaagaatatatcaggcctcaagaagagcttacaagcataggtaacgtgtttgaagaagagaaaaaagaggaagggcctcaggttccgaccatcgatttgacagaaatcgagtcggaggacaaagaggtccgggaaagatgtcagcaggagctgaaaaaggctgccatggaatggggtgtgatgcaccttgttaaccatggcatctccgaggagctcatggatcgtgttaggaaagttgggcagaaattctttgaactccctgtggaggagaaagagaagtatgccaacgaccagagctctgggaatgttcaaggctatggtagcaagcttgctaacaatgctagtgggcagcttgagtgggaagactactttttccatcttattttttctgaggataagagagact

SEQ ID NO: 198 - DNA, 295 bp, Gossypium hirsutum
  Clone ID: LIB3493-025-P1-M1-E12
gctaactggaactatcccagagcaggttgggaatctcaagtccctcactagcctttcactgagtagcaacaagtttataggtcacattccagcatctatttcaagattgcagaatctctggtcccttaatttatccagaaatggattctcagatcctttaccagatgtttccaacaggggcattccttcacttttgtcaatagacctatctctcaacaacctcagtatgtggacagttcctaagtggatcacatacagacagctttcagatgttaatctagctggctgtaaactg

SEQ ID NO: 199 - DNA, 187 bp, Gossypium hirsutum
  Clone ID: LIB3493-025-P1-M1-E2
cggacgcgtgggaaagcctgagacgctacatcaagaagccatgggagataactggaccctgcgccgacccagagtacaaaaacgcggtgcccaaagccacggagtatcggggtcggtggcctggcagcactttgggaaaggccattgtgcctaccttcggccctgaaaccggctttgacattaaata

SEQ ID NO: 200 - DNA, 55 bp, Gossypium hirsutum
  Clone ID: LIB3493-025-P1-M1-E3
aagctgtaccctgaggaccggtccgaattccggtcaccacgcgtcggttgctaga

SEQ ID NO: 201 - DNA, 101 bp, Gossypium hirsutum
  Clone ID: LIB3493-025-P1-M1-E5
aaactgtgagtgattacagttgtaatggtcgtcatgttttcactcgtacaaaggagctgcagaggccgctagttggttcaattatacagagtatgtgggga

SEQ ID NO: 202 - DNA, 354 bp, Gossypium hirsutum
  Clone ID: LIB3493-025-P1-M1-D8
agaagatggaggttgattcagttccagcagcagctttggaagggttttcaccagtctctacaactaggattttctggaattccaggaaaagatctgctagcgggaggaatttagacaaggtaacagaagagactgctaatgtgacacccaccaaacaggaagaacaaactcttgatcaagacaatacaccagattccgctacctcgtctgaactttccgagcgtcggaaggctctctttgagccactggaacctattaaaaacatcaatggccggcgaccgtcagcagagtctttgcttcccccaccagacttcgatgctgcgagctatccaaagggctggctgatcggaaaga

SEQ ID NO: 203 - DNA, 386 bp, Gossypium hirsutum
  Clone ID: LIB3493-025-P1-M1-D9
ggcctttggctttgtgagatacagtactcatgctgaggcagctttggctattcagatggggaatgctcagtcatatctatgcggcaagcaaataaagtgttcttggggcagcaagcctactccaccagggataagctccaatccacttcccccacctgcagcaccattacctggtctttcagccactgaccttttagcttacgaacgacaacttgccatgagcaagatgggtggagttcatgctctaatgcacccacagggacagcatcctctgaagcaggcagcaatggggggtggtgctgctggagcaagccaggctatatatgatggtggtaccccgaatgtgtgctgcccagcagctaatgtactatcagtaacatataaag

SEQ ID NO: 204 - DNA, 410 bp, Gossypium hirsutum
  unsure (1)..(410): unsure at all n locations; Clone ID: LIB3493-025-P1-M1-E10
taaactctcaagcagccgcagctagaaaagggttattgaagtaagaaattgagcaatgtctccagctaaagttgacagcaagaaaaaggccgatccgaaggctcaagcagtgaaggctgctaaggctgtgaaatcgggtgtgacatttaagaagaagtccaagaagatcaggacaaaagttacctttcatcggccaaggactttgaagaaggaccgtaaccctaagtatcctcgcatcagtgcaccaccaagaaataagttggatcaatatcaaattctcaagtatcctttaactactgagtctgcaatgaagaaaatcgaggacaacaacacncttggttttcattgttgacatccgtgctgacaagaagaagattaaagatgctgtgaaagaaatgtacgacattcag

SEQ ID NO: 205 - DNA, 249 bp, Gossypium hirsutum
  Clone ID: LIB3493-025-P1-M1-E11
cggacgcgtgggctgctacacgagctactggtttcgttgggattcttaccctaaccttgagcttatccatcaaatcattgaagctttcgaagatcatttaaccaaacgggaatcccagatgctgttcaagaaaaacgcccgacccatacgaagggactgtaacagcagaaccgctacaccggtatccgttagcccggttcagcccgacaacgacgtttccggcttgtagaatcctaccatggaagcaac

SEQ ID NO: 206 - DNA, 162 bp, Gossypium hirsutum
  Clone ID: LIB3493-025-P1-M1-D3
cggacgcgtgggggaaaagccctaatttgacagctctctcagtctctcattgtgcctgaaaaccatgtcgaggagaaaggttagggagcccaaaggggagaatactacccttgggccggctgtaccaaacggggaacattttttggggggggtaaaattttg

SEQ ID NO: 207 - DNA, 207 bp, Gossypium hirsutum
  unsure (1)..(207): unsure at all n locations; Clone ID: LIB3493-025-P1-M1-D4
ctgaaaaaaaaaatcacctactctctcactntgctctcttcttgttcctgtgctctttgaccaaactatcgccgacaacctctccaaaagaatggcctatgaagggattctggtggggatgggtaatcctctccttgacatttcgttagtcgtggaccaagagttcttggaaaaatatgatatcaagttgaaccatgcaattttagc

SEQ ID NO: 208 - DNA, 155 bp, Gossypium hirsutum
  Clone ID: LIB3493-025-P1-M1-D5
agggaataaattcataggccaccatgactcgctcgttcaactttctacccatgctcctgttgcttactttatcaaccctgactggccaaaaaatttcaactggaccttcctggactggaagtggcataaaaatacttccattgctaactttctgt

SEQ ID NO: 209 - DNA, 135 bp, Gossypium hirsutum
  Clone ID: LIB3493-025-P1-M1-D6
aaaaaaaaaaaaaaaaactcttgaatccgctccaaaaacattccaatatgttgtttcttcgacttgtttttgggtcaatattcatagtttgttgccttacaacgctttcaaacgaagcttcacttcccaatgctg

SEQ ID NO: 210 - DNA, 176 bp, Gossypium hirsutum
  Clone ID: LIB3493-025-P1-M1-D7
caaaaactgagtgactagtttggttgtgcttactatagcaagagaaacctatcttaatttgggcatcggtcctttggcgttttctaaaatccctagcccgatctcctgtggaggcagccatgagccctatttaaccacaacgctatttttgactacgcacgcgggcacattccgtc

SEQ ID NO: 211 - DNA, 353 bp, Gossypium hirsutum
  Clone ID: LIB3493-025-P1-M1-D10
atttgattgcacatacattattgaatcagttcgaaagtaccatgcaacctgattaagctgcaaatgtgaataatcaaccagttttgctcattagatggccaagcacctggaaccggccattatccactaatgcattagaggctcttgaatgtgacatcttaagtaccaagaggaagcgaacggccacgtagacttctcatattaactgacaaagaattctcagcaagccggttgataatgctcacttttaggaagcaaaaggcgcgggcaactccacagtattatttgggaagtgttctcacatcgtctgttatgagtgccattttgagaattggtgcagatgcaaaagaata

SEQ ID NO: 212 - DNA, 371 bp, Gossypium hirsutum
  Clone ID: LIB3493-025-P1-M1-D11
cggcgagcctctatctcggacctactatattctatcacgtaaccctacttacctaccaaccagccgaccaaccaactaatccgatggccaccaccacccagaaacccgtcgacggcgcaacctccactcacacccccacgactcctgcatgcgtcactctcgccgccattttatctgcagaaccaaaccctacgaagatcgtgtcatccttcacggataagtgtgatcctcctaacgctgagggatctctgaaggagagtgggggttcgaagaccaccgggactactgtgggctcggtcgtcggcgatgaaagcggtcccgttaacgatatgcagaagaagattcggcgagctgagcgggtcggcgaacct

SEQ ID NO: 213 - DNA, 249 bp, Gossypium hirsutum
  Clone ID: LIB3493-025-P1-M1-D12
cggacgcgtgggttcttttattttttttttttttttttttttttgtatttgagtattttttttattttattttttttttttattttttttttttttaaaaaataaaaaacaccgctttttaagggtttggttaaaaacattttgaattttttttttttttttgggaggagataggataaattttttttgcaaagactttttttaaggatttaaaccctagggtcgtccgataattccaccaataagaaa

SEQ ID NO: 214 - DNA, 141 bp, Gossypium hirsutum
  unsure (1)..(141): unsure at all n locations; Clone ID: LIB3493-025-P1-M1-D2
cggacgcgtgggtaagaggacgttatcttcaactgcccagactacaattgagattgattctctctacgaggggattgatntctacacgacaattactcgagctcgatttgaggaagtgaatatggatctggttaggaaatg

SEQ ID NO: 215 - DNA, 316 bp, Gossypium hirsutum
  Clone ID: LIB3493-025-P1-M1-C7
ggccgctgttatctacaaccaggacaagccatgggatgatcattggatctgctgggttggaccatttattggtgcagccattgctgcaatctatcaccagtttatcctgagggcagctgctgttaaagctcttggatccttcaggagcagctctgccatgtaattaagcaaatcattctccagccacaagtttaaacaaaaaaaaaaaaaccggggagggggggggttgccctgggggattggattaaagtttatcaatgtggtcaagaggcttttttataccactctatttttaattataatggatgatgtcatg

SEQ ID NO: 216 - DNA, 382 bp, Gossypium hirsutum
  Clone ID: LIB3493-025-P1-M1-C8
gagccaacaagttctctgagagacaacctattgggacatcagctcaaacagacaaggactacaaggagccaccaccggcaccattgtttgagcctggtgagctcaagtcatggtctttctacagagccggaatcgctgagtttgttgctaccttcttgttcctttacatcactgtcttgactgtcatgggtgtctctcaatctaagaccaaatgtactactgttggtattcaaggcattgcttgggcctttggtggcatgatctttgctcttgtttattgtaccgctggcatttcaggtggccatattaaacccactgtgacctttgggttgtactggcaaaggagctgcccttacaaaggcgtgtctacatgatcatgcat

SEQ ID NO: 217 - DNA, 278 bp, Gossypium hirsutum
  Clone ID: LIB3493-025-P1-M1-C9
ctcttctttgttttccaatagttcgtaacaatggcggtctcacttcaagctccagctaccctgatgcaaccaatcaaggttgctgcaccatcaaggaccaatgtgccgctcaggtcctcccagagcgtttctaaggccttcggtttggagcctgttggtgctaggcttacctgctctttgcaaactgacctcaaggacttggctctgaagtgtgttgatgctaccaagctcgctggtttcgctcttgctacatctgctcttgtgtctcggagcagcgc

SEQ ID NO: 218 - DNA, 408 bp, Gossypium hirsutum
  unsure (1)..(408): unsure at all n locations; Clone ID: LIB3493-025-P1-M1-D1
ttttcttttttactctcatcgttcgcaaaaactgagtgactagtttggttgggcttactatagcaagagagacctgtgttaatttgggcatcggtcctttggcgttttctaaaatccctagcccgatctcctgtggaggcagccatgaagaccctattttcaaccaccaaacgcctcatttcttgcactagcgccaccgacgaggccccccatttctcgtcctttagcttgatacccatggtgatcgagcactcttnccgcggcgagagggcttacgacattttctctcgttttctcaaggaaaggatcgtttgcattaacggacccatctacgtacacaccgtccacgtcgttgtggctcaactcctttttctggatgtcgaaaactcttctatctcaataaacatt

SEQ ID NO: 219 - DNA, 114 bp, Gossypium hirsutum
  Clone ID: LIB3493-025-P1-M1-C2
aagagtacgagacattgcaatctacgagccctccatgcactgtagagatgatagaatctgtgtgtatagctcgattctatttattgatattattattattagtataccagtcta

SEQ ID NO: 220 - DNA, 185 bp, Gossypium hirsutum
  Clone ID: LIB3493-025-P1-M1-C3
aatcaatatcctctaattctaaagctaagagttttaagttaacgaagcatttgggtcgtttcgaagtaatggaaacttcaggaaaagtcaaaaagggagccggaggaaggaaaggtggtggccccaaaaaaaagcccgtttcaaggtctgtcaaagctggtctccagttccccgttgggaggatc

SEQ ID NO: 221 - DNA, 88 bp, Gossypium hirsutum
  Clone ID: LIB3493-025-P1-M1-C4
aatcaatattgtctaattctaaagctaagatttataagttaatgaatcattggggtcgggggtaataatggaaactttagaataagta

SEQ ID NO: 222 - DNA, 203 bp, Gossypium hirsutum
  Clone ID: LIB3493-025-P1-M1-C5
tttcagtatcctgttttcccagaaacttttcctgggtttggctcttgatccaacccataagtctttaaggttcaaagatattgctggaaaggagttcactggttatctgaacaaaccccttggctttcaaggtggtcaacttggagaagcttaccaagaatggggtcatacccctattgggaccgatggaaggcctcgctttt

SEQ ID NO: 223 - DNA, 265 bp, Gossypium hirsutum
  Clone ID: LIB3493-025-P1-M1-C6
ttccaattctctctctctttcccgccctttttctgactttctttctcactgcacactcacccccttcttcaatatacgaacacttgaaacacaacggccctcctataaggtctcttcctaaagggatttctgaattctcaattgaccccaacaccaaccggtttcacgttaacctaacccaacccttgaacttccaattcgagaatcaacttcattaccaattccaccttttccgggtcttggctttccgcaagaaccgttattt

SEQ ID NO: 224 - DNA, 366 bp, Gossypium hirsutum
  Clone ID: LIB3493-025-P1-M1-C1
atcgactctgtttgtgttcaaaccgagctacacgagtgttgctcagagaatggcgcttcttgcattatggactgttccaaatcatactatcttgcttgatcgactgacattatccctggtccccttggcacttcttatgatagtggctactttgaaatccatatcacatagcctgatgggtatccatctcagcctcccaaaatgaaatttgtgacgagaggttggcaccctaacattagcagccaaagtgggtcgatatgcctggatatattgaaggaccatttgagtcctgcactcactcttaagacagcttttctttctgttcaagctttgctttctactttctgaaccttatgatccttaaga

SEQ ID NO: 225 - DNA, 496 bp, Gossypium hirsutum
  unsure (1)..(496): unsure at all n locations; Clone ID: LIB3493-025-P1-M1-C10
atgacatcaaactccaaccattttcacttaagaaagagcagcaaagtttcacgcctctaaggccagagattccaccatggctggctagccaaccgatgctcggggctggtcctggcccaccacaccgtatcgacctttcctcctcttcatcatcaatattctcccagagattagatcatcaagatttaacacttcatggaacccccagcgctaaccctagtcttgtccccacactccctccataccatcacacagcactgccttcccctcacatgtcagccactgcattgctccagaaagcagctcatatgggtgcgaccatgagccgtaaatctgggtcatcatcagtaccgtccactgttgcagcagcagcatctgcctctntgatgagaccccaccaacaaactcacgtgtctgccgattctgctggcactaacaacaacacaacaacagctggttntggactcgacttgccttcacgtgaagaactagatgt

SEQ ID NO: 226 - DNA, 425 bp, Gossypium hirsutum
  Clone ID: LIB3493-025-P1-M1-C11
ctcgctcattgctatctttttgttccttttccaagggtgagtgtgatctgttcttattcactccatttctttaacccatggctctttccgtcgagaaaaccgccgccggccgtgagtacaaggtcaaggacatgtctcaggctgacttcggtcgtctcgagatcgagttggccgaggtcgaaatgcccggtctcatggcttgccgagccgagttcggccctgcccaacctttcaagggagccaaaatcaccggttctcttcacatgaccatccagaccgccgtcctcatcgaaaccctcaccgccctcggagctgaagtccgttggtgctcttgcaatatcttctctacccaagaccatgccgccgccgccattgcccgtgactcggaagccgtgttcgcctggaaaggtgagaccctccaggaa

SEQ ID NO: 227 - DNA, 488 bp, Gossypium hirsutum
  Clone ID: LIB3493-025-P1-M1-C12
ctctcttcatctcccacttctcaaaaccctaattatatttttttatttcccattttgattcagaaatcgaagcttgccaatggccaacagtaatctccctcgaagaataatcaaggaaactcagcgtctcctcagtgaacctgctccgggaattagtgcttcaccatcagaggataatatgcgatatttcaatgtgatgatccttggtcccacacagtctccatatgaaggaggggttttcaagttggaactttttttgcctgaagaatatcccatggctgctcccaaggttcgatttcttacaaagatatatcatcctaacattgataagcttgggagaatatgccttgatattctcaaggacaaatggagtccagctctgcagatccgaactgtacttttaagcatccaggcactcttgagtgctccaaatccagatgatccactcttcgagaatattgctaagcactggaaatcaaacgaggctg

SEQ ID NO: 228 - DNA, 328 bp, Gossypium hirsutum
  Clone ID: LIB3493-025-P1-M1-B6
ctttcgtgaggttgtttacactaatcctgtgtcattgggtaagaagttttggaagcacttgtctgtggttttcccatcacgatctaagagagagcttgtcagctattatttcaatgtcttcatccttcagaggcgagctgttcagaacagatccagtagtctggacatcgacagtgatgatgatgagttgtgtggaaatcaaccgtcttataaagttcaagctttagaggaagatgaaaactctgcgcatgagtctcttgcttgatatgaagatcaagccaatgatgatgaccaccatgattgtgatgattgatagtgtgactctgat

SEQ ID NO: 229 - DNA, 128 bp, Gossypium hirsutum
  Clone ID: LIB3493-025-P1-M1-B7
gtagaacatacgttgacacttactgaggcagtttgcggcttccagtttatactgacccacctagatggtaggcaacttctcattaagacccatcctggtgaaatggttaaacctgatcaatgcaaggg

SEQ ID NO: 230 - DNA, 163 bp, Gossypium hirsutum
  unsure (1)..(163): unsure at all n locations; Clone ID: LIB3493-025-P1-M1-B8
cttagcttcaaccctttttcatcttcattcccttctttctcaacgcgacaaaacangggttttaggagaacatctctggtagtagcttccatggctgatctcagcactgtgcttgtcactggagccgctggcagaacagtcagatgtttacaagagctgaaga

SEQ ID NO: 231 - DNA, 264 bp, Gossypium hirsutum
  Clone ID: LIB3493-025-P1-M1-B9
caaaatcagattattacacaacaggggagttgtgcaatctaaagtttgtctgaagatggaacatcaattcaagcaaaccagaaaacagaactggttccagaagcagttttcaagtagaaacggtgaagataatcgtccgaaaccaggcgcacatgaagccgtcattgcaacggctgcatttgctattcaatcagtcgaagaggctaaagcagcgaagctcaagagagggagcttcaagaaagataatagcaggaatggtgtgct

SEQ ID NO: 232 - DNA, 508 bp, Gossypium hirsutum
  Clone ID: LIB3493-025-P1-M1-B12
agagaatactcgtgcggcctatccgatcgaatacattccaaatgctaagataccatgcgtcggtcctcatcctaagaatgtcattcttttggcatgtgatgcctttggtgtcctaccacctgttagcaagctgagcctggctcaaaccatgtaccatttcattagtggttacaccgctctggtggctggcacggaagatggtattaaggagccaacagcaacgttctcggcttgcttcggcgcggctttcatcatgttgcatcctaccaaatatgcagccatgcttgctgagaaaatgctgaagcatggtgcaacagggtggcttgtcaacaccggctggtctggtggaagctacgggtctggaaaccgtatcaagttaccctacactaggaaaatcattgacgccatccactctggtagcctcttgaacgcgacttaccataaaacagaggtgttcgggctagacatccccaccgagatcgagggagtgccttccgaaatcttgcat

SEQ ID NO: 233 - DNA, 407 bp, Gossypium hirsutum
  Clone ID: LIB3493-025-P1-M1-B2
ttcctctgaaactgctcaagttaagggcggtagcagtgccgtgaataaatgggtggagccggacaaattcttacgggaaatgttgttgaagcaaggaaccgtgatgccatgcctgacattaagataaaatcctgtaagtcattttggctcgtctattgatcagaataccatttttttatccaagtttgggaatgaagcgatattcacgcgggggtaactcacactggaaaccgtaatgttgacgctttaaagaggcgagcgagcgctgagcccggtcgagaccaaacgatgcgtggtgtcaacggtagacatgatcgatttcgccacctcggttctggggcggaacgtggaggttcgtacgacggataacgtaaaagggtcaaaggagaacataaagatcggaagcg

SEQ ID NO: 234 - DNA, 351 bp, Gossypium hirsutum
  Clone ID: LIB3493-025-P1-M1-B3
cggacgcgtgggcggacgcgtgggcggacgcgtgggcggacgcgtggggaaatgggtccattaacatcagcaatatattgactgggaaatgccttgctaaaataagggctagtaacggtttcccagtggaaaagcagtgtagctgctgtgatgtcgagtgtggctgcaggtcaaaagtgcacagcagttcatctagaattagaagcacggtggcagaagcattggaagatatcactgctcttttttatgatgaagagcgcaatgagatctatacggcgaataggtatggtctagttcatgtgtggtctaactgatggtatgactttcagtagggaatttatgtagtttgac

SEQ ID NO: 235 - DNA, 201 bp, Gossypium hirsutum
  Clone ID: LIB3493-025-P1-M1-B4
cggacgcgtgggttcagattcaaaaagcaaaccaaggctgcaattatcgttcaggctgctttgcgttgccatcttgcttactcttattataagagtctccagaaagcagcactaactactcaatgtggttggaggggaaggttgctggagagagctaaaagctgaatgccgccagaacaggcttgaagacaaagcaactga

SEQ ID NO: 236 - DNA, 92 bp, Gossypium hirsutum
  Clone ID: LIB3493-025-P1-M1-B5
agaaaatatcacaaatcttcttctccttctcagaaatcttagtatcatcactatggcctcaaatcccaaggtttctttgacatgacgatcgg

SEQ ID NO: 237 - DNA, 398 bp, Gossypium hirsutum
  Clone ID: LIB3493-025-P1-M1-A8
cggacgcgtgggcgtttatggtccatggggaagacccgatatggcttacttgtttttcactaaagatattcttcaagggaaacccattgatatctacagaacccaagatcaaaaagcggtggcgcgtgacttcacttacatcgacgacgttgtgaaaggttgtttaggagcgttagacacggcggaaaaaagcaccggtagcggcggaaaaaagaaaggaccggctcagttaagggtttacaacttgggaaacacttcccctgttcccgtcggccgattagtctcgattttagaaggattactcaacacaaaagccaagaaacatgtgattacgttgcccaaaaatggggatgtcccctacacacatgccaatgtcacgttagcttacaaagaatttg

SEQ ID NO: 238 - DNA, 423 bp, Gossypium hirsutum
  unsure (1)..(423): unsure at all n locations; Clone ID: LIB3493-025-P1-M1-B1
acgagggttgtttattcttatactgaaatggacgaaatcgtccatcctggtggatggtgtgagaatcgccaacctgaacgagccgacacttgtgtactacggagaatacaaatgcacggggaagggcgcgactcctgctacacgagaaaattcgtcaacaactatcggatgcggaagctaaaccattcttggttcttgactacgttgaaggtaccaaatggttgcttccccctccgacagtacctaaataattcattcattcccaactttgtcatgccggcaacgtatcctcacagtattgctaattcaagcagactctcgtctacctctttgctgggtggaaataactagccatccattttattctatttaatttatttcgccttccatgggttgtattttaacaaatagncaaatgtaaat

SEQ ID NO: 239 - DNA, 345 bp, Gossypium hirsutum
  Clone ID: LIB3493-025-P1-M1-B10
cccacgcgtccgcgaagagggcttaaagcgaggcgctaggcgagagcgagagtgagaggcggaaaagggaggaatgggagcctgggctatcgctgttcatggtggcgctggtgtcgaccctaatctccctaaggaaagacaagacgaggctaagagactcctcactcgttgccttgatattggcatctgctctccgctctaatgtccccgccattgacgtcgttgaacttgttgtgagagaactggaaacagacccgctgttcaactccgggcgtgggtctgctcttacggagaaaggaacagtggaaatggaagccagcattatggacgggcctaaaaggagat

SEQ ID NO: 240 - DNA, 249 bp, Gossypium hirsutum
  Clone ID: LIB3493-025-P1-M1-B11
ggtttgtccaactgctaatattggaggagtgattggcaaacgtggtgctataatcaaccagataagcaggaatcaggtgcatccatcaaagtagatagctcaactacagatggagatgattgcttaataactatatcacctaacgagttctttgacgatacgtattcacctgctatcgaagctgctgcacggctgcaacctagatgcagtgagaacgaggagctattgtaacggagatgagaaggatca

SEQ ID NO: 241 - DNA, 298 bp, Gossypium hirsutum
  unsure (1)..(298): unsure at all n locations; Clone ID: LIB3493-025-P1-M1-A4
gttcacagttcacaaacatggcgatttccctatcgacaaatctcttgccaaacactttccagtgcaacgggaaccacaatcatcgttcgacgcgcctctttcccaaccaagcattgagtttcggtctcaaacaccgtagagacgagaacaaactcttcacgccacggaatccgccggtgctctncgccgtctncggctctaccggactggaatcttctgcagggagtgaaaatactggtgatttgttggatacggtcacagtgtttgatttgaacggcaatggatccccatctctgat

SEQ ID NO: 242 - DNA, 110 bp, Gossypium hirsutum
  Clone ID: LIB3493-025-P1-M1-A5
caactgctgagcgggtgaaatcttttcaaacagatgaagatccttcctttgtggagcttgtgtttcagtacggtcggtatttgcttatttcttcttcacgacccggaact

SEQ ID NO: 243 - DNA, 145 bp, Gossypium hirsutum
  Clone ID: LIB3493-025-P1-M1-A6
ctggaacttgaaaaggatcgtaaggagagctataaaaaggcttctgttatttgccctgagagtgatattgaagctttaagagatagggatgaaaccacaactgaacaactggatgctaaacttaagaaactgaataaaaacttat

SEQ ID NO: 244 - DNA, 176 bp, Gossypium hirsutum
  Clone ID: LIB3493-025-P1-M1-A7
actttcctctaattcaatctaagcacgctctcaacatgataccatcaagagcccaacggcctttacctattgatattctatctaacttacgacactctcactgagtctaagaaacatattctgatgcatatcaatgggataccggttctcaataaattacagctgctggaaatgga

SEQ ID NO: 245 - DNA, 305 bp, Gossypium hirsutum
  Clone ID: LIB3493-025-P1-M1-A11
gcactgcaacaccgaagatgactgcatccaacttacaaggttaattccgtcaacagaagctgccttacttgactgggccatcaacttaatggcagatgttgtgcaacacgaacaatacaacataatggacgcccgatacatcgcaatggttttgcaccaacatgactcagatggctgatccttgcggcatgattatgctgtcaagtatgaattctaaaacatgatctgagacatacgagaagggagagtggctgcaaggcaggtcgtccatcgactcgactcactactgcataactgcatcatac

SEQ ID NO: 246 - DNA, 509 bp, Gossypium hirsutum
  Clone ID: LIB3493-025-P1-M1-A12
cggacgcgtgggcagaactctcaaagaaaaaaaaaactagagatccctttggatcgtagcaaaatcatgagtgcggattggggacctgtgtttgtggcggtagggttgttcatcctattgtcgccagggctgttgttccagctgccgtcgaggactcgagtgatagagttcgggaacatgtgcacaagtggaatagccatcctcattcatgccataatatacttctgcataatcaccatcttggtcattgcagttggtgttcacatacacatcgaatgatctattaaaccctcaaacacaaggctaagcttttcttattcctttgatgttctttttactctctttggaatgactattgccgacggaagttttcatttctaacaatattatttctgatggaaaatctcggcggtaatagttttttacctacagaaattccataggaaataataatttcgtctggaatatttttatcagattgatcattatgatacttaaggagggaattt

SEQ ID NO: 247 - DNA, 364 bp, Gossypium hirsutum
  Clone ID: LIB3493-025-P1-M1-A2
gacccacgcgtacccacgccttcgacagagcataatgtctcatgctcgcactttctaacatatgttggtgctatggctggacgtgttattactgtttcaggaatattagactcttttatataccatggtcataaagcagtcgagaagaagagggaaactggcatatacagctgaagatatgaggctgctgctatcatgttccggtgagaggtgcttggggaaaaatcaaactaagcgagaagagcacgcatcagtgtaccgtacagtattcctgttcagacagatttcttggtgatcatgaatatggttgaattgtaatgaggtcatagttcatttacaagtcttagctgtctattacactgac

SEQ ID NO: 248 - DNA, 198 bp, Gossypium hirsutum
  Clone ID: LIB3493-025-P1-M1-A3
ctttgatcttggttactgtcagggtatgagcgatctgctatccccgattatatttgtaatggaagatgaatcagaatcattttgggggttcctggcattgattgaaccccctggtcccaaatttaatcgtgacccaaattggcttcactcttaactttttgcattatcttaactggtggagttggtagaatccccaat

SEQ ID NO: 249 - DNA, 389 bp, Gossypium hirsutum
  Clone ID: LIB3493-025-P1-M1-A10
cagcaagttccctgtttttaatcggacgagggatctataacatgtctcatgggattggaaaaaaggaatgagagctctcactcatggttagaagacatgtttttcatttttgggtttcattatagcatgaaattgcttgtttgtttgctctaataattgtttggtttttatgccaaatggagatcttaaaagataccctttggggttatgttttttagtttggttttggattctcttgaaagctaaatgataagaagctcaaggattcaacatgatattttatgattattattgcataatttggatttggattcaaaaaaaatgaaagaccagtaaacacaaataaggaaggattctcaacatatccaaatgtaaacttacaattacaa

SEQ ID NO: 250 - DNA, 395 bp, Gossypium hirsutum
  Clone ID: LIB3493-024-P1-M1-H7
caattatataattaataatatatattcatactttgaaatttataataatatttttttataatttgataatcgatacctagggacattttatgtaattaacccacgaataaaaaaaatttaaaaaaacttaatataaacgccaaggaagtataccctttttcagagtcataaactacttctgcaacaccaacttgattctgtctcgatctttccgccgttaatctgctaccctgtccctccaacgttctatatttgatctctttactctaaacaaatcacaccacccaccttctgttttacttcaataccccctccccatttttctgctgcttttggggtaatgctgattgcttgaactgcatccctttgctttcttacatatttcagcttggaga

SEQ ID NO: 251 - DNA, 300 bp, Gossypium hirsutum
  Clone ID: LIB3493-024-P1-M1-H8
ttaggctccagttagtgatcgagaatacagggcaactcttcctgaaacagctgctatgattgacttggctacaagcatgataaaggaaggtctgggttcagacttaatgcctaaggaagcagatccatcccctataactgcctatagatataactccctttgtgcctacatgggggatgatgacatgttcagttcagaccttaatgagcaccagcttagaatgagacttggacacatgtctagcactccttgccaggttatcttttccatggatgatgaatatgtgccagagtatgttga

SEQ ID NO: 252 - DNA, 56 bp, Gossypium hirsutum
  Clone ID: LIB3493-024-P1-M1-H9
gctggagtgtggatcatagccgattttaaacacgaaaacatccggaagatatatat

SEQ ID NO: 253 - DNA, 436 bp, Gossypium hirsutum
  Clone ID: LIB3493-025-P1-M1-A1
agactttgctttgtctcactctaagccccctctcaacatgttcaaacaagagcctatggcccgttcgaagttgatttgtaaactaactggcgataccgtcaataagtctgaggaacatatttggaagcatatcaatgggaaacggtttctcaataaattagagcaaaaggaaatggagaaggagttgaatgatgaaaccatgtgcgaggaaggtgagaagaagccaaagaaagtaaaaaataagaagaagaagaagaaggaaaaggaaaaggcagttgaagaaattatcttcgaagttagagattcagctgaaaatgaaagtgagtctgaagaacttgagttctggattcccccggttggagaccgttgggactttgatgacggaggggatcgatggggttctggttcagagtcagatgaaagtgatgatgaaaac

SEQ ID NO: 254 - DNA, 348 bp, Gossypium hirsutum
  unsure (1)..(348): unsure at all n locations; Clone ID: LIB3493-024-P1-M1-H3
ctggattactatttttggattggatcggtataagtattaatttcacaaatataccatatgaaaggcattttaaagtgcgggccgagaagtttgttaatgtccagcactttgagtcccttctacactattcattccaagacccttctttgttggtggaagcattaacccatggttcttatatgcttgctgaaattccaggatgttatcagcggctggaatttctaggggactccgttttagattatcttattactctgcatttatataataaatatcctgngatcacgccaggattattaacggatcttaggtcagcatctgttaacaacaattgctatgcattatcag

SEQ ID NO: 255 - DNA, 459 bp, Gossypium hirsutum
  unsure (1)..(459): unsure at all n locations; Clone ID: LIB3493-024-P1-M1-H4
cggacgcgtgggcggacgcgtgggtgacactgaagctgaagcacgtgaaataagactcagcttactcatggaaatagagaagaggaagcaggcagaagaagctctaaataagatgctacatatgtggaaaacaatcagccaagggttagctgttgtgggattgtcactgcctgcagatcctattgatgtgacagatgatgagctggtgaatcaagctgaagaattgaggcagcaagcagatgttgcacgatttgtatcattaaccgttggaaggggaattgcaagggcagagatggagatggagatggagctcaaattgactcanaaaactttgaaatcgcccgattgttggaccgactacactactatggagctgtaatcagggnatgtctcagaggaaccaggaggctgtagagatggcacggcgagagagacaaaggaagaaaagaaggcagagat

SEQ ID NO: 256 - DNA, 465 bp, Gossypium hirsutum
  Clone ID: LIB3493-024-P1-M1-H5
gttgatttcactgaaattatccacagttgaatcgagggttccaattagttagtcgcagtgagaaagaactacttaagtaccatcttaattaacaaaacaggccaaagatggaaggggttgagcacagaatagttaaggtgaatggcataaacatgcacgttgcagagaaggggcaaggcccggtcattcttttcgtccatggcttcccggagctatggtactcttggcgtcaccagattgctgctttgtcttccaagggttaccgagctgtggcccctgacctgaggggctacggtgacacggatgctccggattcagtcacctgttacacctgttttcatatagttgggggatttagttggcttttaaacaccatcggccctgacgaacaggtgttcgggttggccatgattgggagctatcattgcttggtatttgggcttgttcaggccagacaaagtgaaa

SEQ ID NO: 257 - DNA, 298 bp, Gossypium hirsutum
  Clone ID: LIB3493-024-P1-M1-H6
actgtttacagaaaattgaatgctggttagactcatgctacctttggggttggtttcatttgtactttcactttatggcgtttggtggttaaatctgtttgatcacaagtttgttctgttgaaacttttagtttataatgagatccaagtgttgcattatttcatttttacccatccaagtgcttaatttgttacaggtcttttttatgtggtggatcaaccggtatatttatctacgcctactgcttgtattattactacgctcgatccgacatgtctggatttatgcaaacctcgt

SEQ ID NO: 258 - DNA, 437 bp, Gossypium hirsutum
  Clone ID: LIB3493-024-P1-M1-H10
ctctctctcaacgcagagcgaataggcggagacttccaagaatctatcgcatcagctaatcacgctccaaagtcagaatggatcaggttcaacacccatctgtcatgcagaaggtagcaggccagctccttcgttctagccattctcaagattttcaaggttataatgggtctttcaggagtcctgctctataccaaaggcgtgctgcatatggcaattactccaatgctgcactgcagtatcctgtccgggcttgtggagacctgtctatggttccatcaacagcttcagctatttgcgttcaagcccctgctgagaaaggatttgccagctttgccattgatttcctcatggggtgagtttctgctgctgtatcaaaaacagctgctgcaccaattggagcgtgttaaagctttgattcagaaccaagatgaaat

SEQ ID NO: 259 - DNA, 436 bp, Gossypium hirsutum
  Clone ID: LIB3493-024-P1-M1-H11
gctgctcagattgtggtaggatccattctacactgcagaagttgctcattcgtggagctgaaaggctccctgactcccttttggatatattaaagaagaaatatgtgaaaaaaggtttagatgctgatatcaatattgatgtgagatggaggcttcttagcagcaaattctcttctcctgaaactagattgttgctttctcaagcagttggtatcttccatgaatgtttcaaccccatagttgatgcaacaactgggagggaccttatcccatgcatggtttatggaaggaacttaaagggccaagaatacggaggaatgtattgtgctgtattgacaattaactcaatcgttgtatcagctggaataattcgagtttttgggcaagaaattgctgaaatccctttagtcgctacaagcattgctaaccatggaaa

SEQ ID NO: 260 - DNA, 365 bp, Gossypium hirsutum
  Clone ID: LIB3493-024-P1-M1-H12
gttgtgctgaagattttaagaagtactgtggctaccgttcccatcattcattctgcttcacaggatggttcatttccacaactgctaaatcttgccaccttgtcggaagtactaaaatgtatattgagacattttaaacattcatctagatccttgcccattcttcaacaaccaatttgttcaattcccttgggtacttgggtaccggaaattggtgaattaaatggtcagccgttggcaatgctgcgaccaaatgcctctcttggtgctgcctcatcactgttagttcaagccgatgtaagttccataccaatagtggatgaaaatgactcatggcttgacgtatattcacggagtgatataac

SEQ ID NO: 261 - DNA, 338 bp, Gossypium hirsutum
  Clone ID: LIB3493-024-P1-M1-H2
aagagacccaacccaatggcttcgtctctgccttcatcttccattgctagaggcggcagtggaataatcaccacccttcatccagatataatccgagctctcatcctcacgcggctggatggtcccgacctggcttccaccgcctgtgtttcctcttatttacgttccctatctacagaagaaaatctctggcgtgacatttgttgttccacttggccttctctcgatcacccacgtctgaaacaagttatctccacgttcccttccggttaccgctccttcttctccgaatcatttccgtttcctaatctccaaccaccgaagcctaacgtcaggcg

SEQ ID NO: 262 - DNA, 465 bp, Gossypium hirsutum
  Clone ID: LIB3493-024-P1-M1-G6
gttgagttcgcagcgatgtcgaacgagttcgccgataagggggacaagattatctatgaaaccgaagccaaagggttcaacccgggattgattgtattgctggttattggtggactactgataacattccttgtggggaactacatactttactcgtacgcgcagaagactcttcctcctaggaaaaagaagcccgtatccaagaagaagatgaaacgagagaggctgaagcaaggagtctcagcaccagcggaataggaattcaaggtccgacttttctcttttttcgacattgttaaaaactgttttgttcacaaatttctgtccagtttcgagagttaaaaacttcaacatctgaattagaagtaaaccccatactcgggtaagactactgttcctttgttcgtcggatgcagtttatgtgtcacaatttcgttgcatcttttttatgtatcccatgatctc

SEQ ID NO: 263 - DNA, 387 bp, Gossypium hirsutum
  Clone ID: LIB3493-024-P1-M1-G7
catcccccgaatctaaaactcatccttccccttccctttcaaatcctgcggccctccttcatcaccacacaccacaactactatactcccaaaatgtctcttacaatccccactaacctctccaaatcccttttgaagccaaagataaactcccaactcacccccaaagtttcacgatcattggtggtatgctccaccgacaagacttcatcgccaccatcatcagcttcaccactccaagccttctcagcagctcttgctctttcttccattcttctctcagccccgcagcctgccgtagctgatattgcaggcctcacaccatgcaaagagtccaagcaattcgcccaacgtgagaagcagcagatcaagaagctggaatcgtcg

SEQ ID NO: 264 - DNA, 415 bp, Gossypium hirsutum
  Clone ID: LIB3493-024-P1-M1-G8
gaagaatctaatgaggaaggagcttcttctatcatgcttgatcaggtacttgatcttttgagccgaaggtgggatagaatcaatggagctcaggcacttagactgttacccagggagactaaactacagaacttgcttccatttcttggacctcttctgaaaaaatccagtgaagcatacaggaacttctctgttatcaagagcttgaggcagagtgaaaacctacagatgaaggatgaactctacaaccaacgaaaagctgtagtgaagatatcgagtgacagtatgtgctctctctgcaacaagaaactgggaacaagtgtatttgccgtttatccaaatgggacaacactggtcccactttgttgttttagagattcacaaagtatgaaagcagtatccaaagtctcacaac

SEQ ID NO: 265 - DNA, 366 bp, Gossypium hirsutum
  Clone ID: LIB3493-024-P1-M1-G9
ctgttactagcagcattcaggtgataaacaaacaacctgattcattttcaaactacatagctgggaagattactagctacatataacaggcagaaacacaatacaaaactgcttatttgttttggtttggtaatgcaggcttctactctcacttaacccttcattagtactctatccaaattgcttactaaatcattgatacaatttttcaatagtttgagttgttggacagtccattcatccaaaacctcatattttgctacagacttggcatccatggtttttcagattgaaaccttgctccccctttggtgggtattaccaaacttccagtgtaattgactaaatctatcagaattacgcaac

SEQ ID NO: 266 - DNA, 443 bp, Gossypium hirsutum
  Clone ID: LIB3493-024-P1-M1-H1
aggaaatcttagtttttgaattgcgtgactgaatgatctaatggagtctaaaggtgggaaaaagaagtctagtagtagtaagtctttattctacgaagctcctctcggttacagcattgaagacgtgcggccaaacggtggaatcaagaagttcagatctgctgcttactccaactgcgctcgcaagccatcctgatatactcacaagcggcatctgaccactagtagtggttaataaaactgttatttgctttgttagttagttttagattatttccccgaccaactcttctctcttcgtggctggtttctttacattgcgttcttctgatttggcgactgtgtaattccgataaagtttgcagcccttggttgaatcacaatggcagtatctgccaattggatttggagggtattgaaaaaaggcttgaaattcctttttt

SEQ ID NO: 267 - DNA, 402 bp, Gossypium hirsutum
  Clone ID: LIB3493-024-P1-M1-G2
ctgacgaaaaagaaaggcggaaacttatcgaaggagcggaaataaaagatgattgagcggaaatggagtttgctaacaggcccagttgtcatcctcggcggcgttgtgggagccaccgtcgtcgctcactttctctttgttgacgatccatatcttaaaccaaagaagaatactgattcaccaccacaaaccaagtagaaagaagccgacgtcgctgttggcatttggagcaaagaaatgcctaggtcgctgtttaaaacatgagttgtttgttgaataatgtcaaatctgtatagtttgtaatgtgggttagcttctgttttctctttcttaaataacaactcaactacaaagttcttgttcaacaaattataggggcaagaacatgtttattgtttttgc

SEQ ID NO: 268 - DNA, 400 bp, Gossypium hirsutum
  Clone ID: LIB3493-024-P1-M1-G3
gcgggatctaccggctaagttccagcaaacacttataccggacctggagagaatctcgacaacctcgaaagtttacatcaacaaatacaacaaagagttcaccaaacagttcaaaccatatgtcggcaacaaacatgctcccaccattgctactgtaatctcttgtgctttccttttaatccctttactattagtttccctcatttttaaccgcatcaaagcttatttttcactccaaaagattctcatcttcatccaaatttacctctcgatttacttttcaatcctttgccttacctccctcgtcaccggacttgagccgcttaagttcttttacgccacctcgccgtcgacctacgtgtgtttacaagtgcttcaaacggctggggacgtgctttac

SEQ ID NO: 269 - DNA, 392 bp, Gossypium hirsutum
  unsure (1)..(392): unsure at all n locations; Clone ID: LIB3493-024-P1-M1-G4
cctcctcacaccagcacgaaccccaacgagactttcatcaaccattctatcaaccctatcgacaagatttgccaccgcatatgccagttaattacccaccccacgaatcttctgcctcttattcatttgctaatttccagtcatatccgagtttcacggagagtagtttacctgcagccccgtctcactatccatcatcctatcaaggttccgagactccttacaatcctccacagtcagccccgtctcactatccatcatcctatcaaggttccgagactccttacaatcctncccagtcagctcctccgacaacaagctattcatcaacaaccgctcaatactcttcaagtagcagaaacgggaaaatcgcggaaccttcaccacctact

SEQ ID NO: 270 - DNA, 346 bp, Gossypium hirsutum
  unsure (1)..(346): unsure at all n locations; Clone ID: LIB3493-024-P1-M1-G5
atttgttttttttttttaggctttgttgccccactatccttctaagttgcgaagtctaagaaggtgtatttctttgaattcgtatttcatatttaccatgcttcaggcatttgaacctcctttagatatgagccaggatgtggatggttgcaaggatccacacctagaaaactttgaacatgggcattgccattctgaggagagaaantgcttctctgtcagtctgcatcaaccagcggaagaagggttgttctaaccatgctgaagctgtcctcaggaaanaagcaacataatgagcaatccaacaacaggagaggtgaaaagcgaacagcaacatgagcctatt

SEQ ID NO: 271 - DNA, 362 bp, Gossypium hirsutum
  Clone ID: LIB3493-024-P1-M1-F9
gcaagcaagatgttcagaatctccctgtaactttattgaaagtgaatgatccaaggattgttatcagacgacctccgactgtgccacagcaggctcaagtttctggttacagggtctggcaggatataccagttctcgtcatggtcagcatactggcttacttctgtttccttgaacaacttctggtgtctgatttgggtcctcgtgctctagccatctcattaccattctcctgtgctttaggtcttctttcctccatgattgcttccacaatggtgagcaggagttacatatgggcatatggttccttccagtttgcaatggttattctgtttgctcatatcttttatacagtacttgct

SEQ ID NO: 272 - DNA, 438 bp, Gossypium hirsutum
  Clone ID: LIB3493-024-P1-M1-G10
aacaatttgaactgatcattgctatgatgatgatataagccaaagtgggtctgtttcatttgttgtttcgacctgcatattgaagattaacgatggcgggaatagcaatattactagatctatacaagaaaaaaccaagcttttgttctccacaaagcttccactcttctgggttattctctgcctccgctgccgccgcatcggccgccgctaccgtcgctgctggaaccccttttgcctccaggtttctttttggttatcccaaggtttcacattgtgatgctggtgctgtactgcctgaacattacatttcaaatacccaaagatcatctgaacatttctttaagaatgatgctctcaaatacagtgtgaaggagtataagattgagctgaagcctctgttttctgcttttgaattgagggccaattgcttgacaa

SEQ ID NO: 273 - DNA, 356 bp, Gossypium hirsutum
  Clone ID: LIB3493-024-P1-M1-G11
cccacgcgtccgctttaagttcatcgttaaaggagccttatctaggcatcttcgattcatggaaaggcaccgattgttgttccaactggtacggtattagctgtgaccccaccactcaccgagtcaccgacgtttccctccgcggcgagtccgaagaccccattcttcaaaaaaccggccactcatcttccggttacatgaccggtaccattaacccttctatttgtgagcttgaccggctcactactttaatcattgctgattggaaaggtatcgccggtgagatcccatcatgcttggcgtcgttgcccaacttgagagtcttggatctcatcggaaattccttatcgggaaaa

SEQ ID NO: 274 - DNA, 449 bp, Gossypium hirsutum
  Clone ID: LIB3493-024-P1-M1-G12
ggttcatataggctaaacaagtaaaagaacagatctacagagcacgaagatgaggaacttcaacttcttccggagattatccagggcttttgatgattatccttctctttctaagatcatcgtcgtctcgactatcagtggtgggagccttatagcttatgctgaagcaaacgctttcaatggcagtaagggccatattgctcatgctgatgcggtggcatctaatgatgaccgtcgaattgcttcatctgaacaagttcccaagaaaaagaaggtggtgctgcttggaactggttggggaggaatgagtttcttgaagagcctgaataaccctaattatgaggtgcaagttgtttctcctcgtaatttctttgtgttcaccccattgctaccaagtgttacatgtggcaaagtggaagcccgcagcattgttgagccaattcgcaaca

SEQ ID NO: 275 - DNA, 89 bp, Gossypium hirsutum
  Clone ID: LIB3493-024-P1-M1-F4
gacatttaccctaacatcataacctttgtccattgtgaaaccaccactggagggggcactgatcatgtgctaccatcatatcgctacta

SEQ ID NO: 276 - DNA, 417 bp, Gossypium hirsutum
  unsure (1)..(417): unsure at all n locations; Clone ID: LIB3493-024-P1-M1-F5
aatgttttgaactttcttttgatacccattccctttccattcatcaagggctttctcctattaccctttcccctctccctttctctctttcctcttcacctgaccctatcaaaggaacccagctttccatctcgctaccagacgacgatattttgaactccttcttcatcgttttttctacttcccgttcttcttctgctctccaatggctatccccgccgcanacgtttaacanaaaaacacccttttgtttataccaaatttcgagagtgcctcaacgaaccccttcctgcgctntgcagtntgctgttaccggctcttcaattcatgtcttttggtttgggatctaactanggagagtggtttcatcgcatatcatctctgtagcattgggatacagtagagaccctgaaaacc

SEQ ID NO: 277 - DNA, 481 bp, Gossypium hirsutum
  unsure (1)..(481): unsure at all n locations; Clone ID: LIB3493-024-P1-M1-F6
aattcacaaggatgaagctgatgatagtggtcgtacagatttactgggaagttataatcagcttacaccagatgaggctagaagctatgctttatctcaattaccaagggaattatccaaacacacgggctttgcctttgactctcctggttacgagtccttttttgcttcacaactcggtgtatatgcacctcagaaagcatgggatgttgctcgcagagctagcatgaggtcgaagccaaagccaaaaccaaacaaaataaattgatttggaacaacattgttgtacaaattttttccccaaacccctcatttgatagcctagccctagagatctgtaaaattagtgaatttgatgtaatgctggntttttttttttttnttnnnnnnnnnnnggagttccattataaagctttcttttaggaaccaaatcgagtgaggtgtcaacgatgtacagaaaaatcatgaacactcttaaatg

SEQ ID NO: 278 - DNA, 503 bp, Gossypium hirsutum
  unsure (1)..(503): unsure at all n locations; Clone ID: LIB3493-024-P1-M1-F7
caactttccaaaatcaaaccctatcaattgtcattatcccttccagaacattgtcacagcatccacccccagttaggttctctcagtctccttcttcccacagtttcaacaatgaaatctggtactcctccttccagagctttaactgctgtcctaaaagcaatgcttggagacaagcataaacttccaccgtaaaaggcgacgcaaccaccgtgtggagaatcattttagaggcaacaatctcacccaatgcgtttctagcaacaacccccgaacccggtctggcttgtgtttgattgaaggaagcatcaaagttgattttgatcaacaaatttgttgaggggttccattcctcatttccttccaatctacccatatggagcaacagaacgtcctgcattacttggccgtacttcttctaaaaatccagagaaaatgaataactccatggaaatagaagatgagaacattgagaagacanagattagtcttatgagaatctt

SEQ ID NO: 279 - DNA, 440 bp, Gossypium hirsutum
  unsure (1)..(440): unsure at all n locations; Clone ID: LIB3493-024-P1-M1-F8
aatatatatatatataatatcaaaaggtcttccttcagttgcttaaaaccaaaatggcagtttcatcatttagaagcgggcgtttaccgttgtttcatcaccctcaattgcctaataaagccgctgcttgtacaacaagatcgattggtgggtttaagaagcncaaatgggcgttcagttccaaccccaagtgcggaagggccctctttctttttgcccagtactctcaatcatctcaagctcaaacacagcaagatcgtttctcatctcgtctccaaagtagtcttgagaacttacccaagctgctggaggatatcgtccagacatctataagcacaggtccccgaggagccctgaggctagctcaaggtattcaagccttttgtggtgttggtgggggatggcttgctgatgtctctaggtccacaaatgaacctact

SEQ ID NO: 280 - DNA, 451 bp, Gossypium hirsutum
  unsure (1)..(451): unsure at all n locations; Clone ID: LIB3493-024-P1-M1-F11
aaagaatccaaagcctataagaaatgggcaaagaaagtagccgagatgaagccacccacgagtcccttgaggaggaaggggaaatcaaataaacagccagaatcagatctatttgcaattatatctcagcgtcgaaatgagaggaaagaccgatttgattccatgttttcatcactggtatccaaatatgggggtaacgcagagtctgaacccactgaagaagaatttgaagctgcgaagaggaaagttgaaagcaaaaaggcctccaacaactcaaaacggaagcggcagtaggtctcacctggattttattgaagttggatgtgatgagaattatgcaaaaatgcatgtctttcaagtatatgaatgcaaattgcgttatatgctctaagaaacgtgagatgatgctnttgttgtagttacttaaaaaatgaaagctcatttgcactta

SEQ ID NO: 281 - DNA, 249 bp, Gossypium hirsutum
  Clone ID: LIB3493-024-P1-M1-F12
cgttttacgtggttttgtgcttcttcttaaaattaaactaatggctgcaattcataaacttgaggttgaagaggatgcggatcccagagcagttgttctcagcatcaacggcggtggagacgtcgcaccgtcgaagaaccccaaagaagagcctgacatagacacaactttaggcgcgatgcccacggcggtgcacgtgccgtcaggtgtccccgtaccgccagtcacgggaggcacccgccgggccga

SEQ ID NO: 282 - DNA, 486 bp, Gossypium hirsutum
  Clone ID: LIB3493-024-P1-M1-F2
caagaacatcctttcccttcatgtcctccttgactactttggtgccaagaagctggaccaaataaggaatggtactgcactagctgctactatgttccaagctactggtgtggctcctggggtttctgggtttgttaatataaccgattttaaaggtgggaaagttggttttggagctgaagacaatggtggaagtttgaattccttttttgttaaatctgtggaggaacttccttacaatatatctgtgattcagatcagcaaggctttgccttctgttgtagctgaggctcctactccagggccaagtgagctgaatatcactggcattatgtcagcacatgggtgtaaagtgtttgctgatacccttttggctaaccctgaagccatgggaacatatgaggataatgttaatggaggattgactgtgtttctgcctaatgatgatccattcaaagccttttaccaaaagtcaagaactttaca

SEQ ID NO: 283 - DNA, 353 bp, Gossypium hirsutum
  unsure (1)..(353): unsure at all n locations; Clone ID: LIB3493-024-P1-M1-F3
ctctcgagaaatgggttagtggtgcttatgctggtcatactgctgtttgtgttaaaggattccgaagggaagctatggattggtgaatcaagacatgaaaatgagaagggagaagatatcattgcgatcgtaccatgggatgaatggtgggattttgagctgaacaaggacgattctaatccccatattgcatatctaccactgcatcccgatgttcgagcaaagtttaacgagactgctgcgtgggagtacgcactaagcatggcaggcaaaccgtatggttaccataacatgatatntagctggatagacaccattggtggaaattatcctnctncattggatgctcacct

SEQ ID NO: 284 - DNA, 440 bp, Gossypium hirsutum
  Clone ID: LIB3493-024-P1-M1-E8
atcttctgcatggatcagaatatgttctcacttatgaggataaagatggtgattggatgcttgtgggtgatgtcccatgggagatgtttactgatacctgcaaaaggctgaggatcatgaaaagctctgatgctattggactcgctccaagggccgtggaatgccggaaccggaactagctagtttgatacatgatttttgctatccgatgcagttctttctgaagaaataagaggatgttggagcgggcaggagatcacagggtatctgcttttcacatggtgctactttttatcttctatttgcatgggaatttatatcatgtacgcttgtttttatctactaaaattatgaaaccatcaaggtctagtggtttagagtctttgaacgaggtcctgttcccaatctttttttaagctttgtaagtgcattggttcttg

SEQ ID NO: 285 - DNA, 409 bp, Gossypium hirsutum
  Clone ID: LIB3493-024-P1-M1-E9
tactcagtgaggaagaaaaggctgctgaaaatatttacatccagaaaacgtgagcgagagaaattggagaaacttgcacgcaagggacccaagccagaggagaaaccggatgctggttcagggggtgctgcgaccgatggtagcactacctctacatcgggaacatctgctgagaaagtatcaaccgataagtaccgaaactacggggttctcgctggtgttgcaacccttggtgctgctgtgggatggtatctcaactctaaagacaagaagcaagaggcctgaaatgggggtaatgcgattggattctctaggggaacatggcatgaatggttaccccaatgccctgttcgtgtgcaaagtaactgaaaaataaaacaaactttgtaaagcagcttatcatgttttc

SEQ ID NO: 286 - DNA, 502 bp, Gossypium hirsutum
  unsure (1)..(502): unsure at all n locations; Clone ID: LIB3493-024-P1-M1-F1
gaaaaggaaaggaaaactgaagaaggcgagaagggatcgagaagtcaaatggatggcgcttttttttaggttcttgagcaacagacccaacaattgatgtgctctagaccgcatggaccagtacgagaaagttgaaaagattggtgaagggacttatggcgttgtttataaggctcgtgatcgcatcaccaatgaaacaattgctttgaaaaagattcgcttggagcaggaagatgagggtgtacctagcactgctattagagaaatttctctcttgaaggaaatgcaacatggaaatatcgttaggttgcaggatgtagtgcacagtgagaagcgtttatatntggtttttgaatatttggacttggattntgaaaagcacatggattcatgtccagaattcgggaaagatccaagaataataaaaacattccttatcaaattcttcgtggcattgcttattgtcactctcatagggttctttaacgagatctaaaaccac

SEQ ID NO: 287 - DNA, 467 bp, Gossypium hirsutum
  Clone ID: LIB3493-024-P1-M1-F10
caaaacggtaccgttttttgctccaatctcgtttaccttaaggtgtttatcttggtaattgatattttgctcaaatctttcagcaagtaaatattgcagcttttaaaattgtgggtttttttttcttgcttaatccatggcttcttccatgcttaatggagcagaaagcttcactctcattaggggggtaaccccaagaagggttgatttttttgggtcaggttttcatgggaaacacttatctaatttgggtttagcctttagtgtgaggatctccaggccaggaacaacaatggctccaaagtgcggcttatcagcatcaaggccagcttcacaaccacgattcatacaacacaaaaaagaggctttttggttctacaggttcctctcaattatatatgaccatgtgataaaccctggtcactggactgaagacatgaggaatgatgcacttgagccaaccgatc

SEQ ID NO: 288 - DNA, 341 bp, Gossypium hirsutum
  Clone ID: LIB3493-024-P1-M1-E3
gtctgaagatccccacaaaggtagcatttatgcggccagctggagtcctgatggtgagcaggtgctgacagtatctgctgataagactgcaaaagtatgggatatctctgaggatggtagtgggaagttgaagaaaacattgacatgttctggctcaggtggagttgatgatatgcttgttggatgtctttggcagaacgatcatcttgtcactgtatctctaggtggcacaattaggatattttcttctagtaatcttgaaaaatccccactccagttatctggacacatgaagaatatcacttcattagctgtcctaaaaagtgacccaaaatgtatac

SEQ ID NO: 289 - DNA, 409 bp, Gossypium hirsutum
  Clone ID: LIB3493-024-P1-M1-E4
tttcttttggggtgctcgtcctaatcaaaaattgccacaatatccacttgctacacatgatcttgtcctaagaggtgtcatacctgttgagtttgagatgaacactgtaggctgggaagaaggtaaaaaaatagagttggaaaagaaacttctactagaagatgccatttctgaccttccatcagttggaaattatgaggataaagatgaaatggactatgacaaagatcctaaaacagagtttcaaagattcatcaggttaagaagagaggagatgcctggtttttcttcattaaatgcaaaaccaacaaaacatttgctctacgatcatcttccacttcaactcaacacggatgattaccaacgtgtttgccgggttcccaaaaggaagggagcaaattttagagac

SEQ ID NO: 290 - DNA, 478 bp, Gossypium hirsutum
  unsure (1)..(478): unsure at all n locations; Clone ID: LIB3493-024-P1-M1-E5
aagagctgttgatgatggagtgaacacatataaggcaatgtgcagggacagtcgaatggtacctggagctgcagctactgaaattgagttggctaggagattgaaagagttctccttcaaggaaacagggtgatctatttttttttctacgttttacttccttactacaaagtatcatcctgcatattgtgtgttacacctacatcctttatgtcgttaacacacattagtcttatatttttcatttatcatttatgtttcatctctctgttagggatctaatataattcttgaaatttatagtagatttggataagtattagaagaggctactagttctaaaattgatgttatgcanattggatcagatgccattgccaaggttgcttgaagttttgaaatggtaccaaggaaccctagcagagaatgctggtctcaatccaatggatatcatatcttaagctgtatgaaaaacatg

SEQ ID NO: 291 - DNA, 476 bp, Gossypium hirsutum
  unsure (1)..(476): unsure at all n locations; Clone ID: LIB3493-024-P1-M1-E6
gtgatttgaagtatcctctcatatctgatgtcacaaagacaattgccaagggctatggagtgttgattcctgatcagggaattgcattgagagggcttttcattatagataaagagggaattatccagcactccaccatcaacaatcttgctattggacggagcgttgatgaaacaatgaggactctccaggccttgcagtatgtgcaggaaaatccagatgaagtatgcccagctgggtggaaacccggagagaaatccatgaaacctgaccctaagctcagcaaggattactttgcagcaatttgaggtgtagcctanaaagcaaaaggtatgtgttgcgttcattaggattgactaaataagttttgtttttcaatgatcctttttgtttaaagaattgcttaccttggattgagtataaaaggtggggaaatattcaattttattgttggattgtgttttatttttaaaggg

SEQ ID NO: 292 - DNA, 272 bp, Gossypium hirsutum
  Clone ID: LIB3493-024-P1-M1-E7
gtctttttacagggctgtcatagctgagttcattgccactctgcgctggggctacatcactgtcttgactgtgatcggttacaagacccagaccgaccctgctaagggcggtgaagattgtggcggcgttggcattctcggcattgcttgggcttttggtggcatgatctttatccttgtttactgcactgccggtatctctgggggacacattaacccagcagtaacctttggacttttcttggctaggaaggtgtcgatggttcctgcca

SEQ ID NO: 293 - DNA, 439 bp, Gossypium hirsutum
  Clone ID: LIB3493-024-P1-M1-E10
cagcctcccaggctgtccattccctactcaccagcattcaagagtggggcgcttccattctttgccataacccaacatttcttctctacattaccctccaagaatcaccagccgctccttaaatctacaccccaaagttcggcacttcctgttgttccccttgatggtaaggaacataatgttgaaacagtgaacaagcagctaccagaaggatcccaacaagaagacaagagcttctggggtgctgttagtttgattattggtacggctgtagggcctggaatgttgggtttacccgctgcaacgataatatcaggtccacttccatcaaccgttgccattattatttcttggggttatgttatttcctccatcattcttattgcagaactaagttttgcagtaatggaagaagaggtgtagccgagtgagcttactg

SEQ ID NO: 294 - DNA, 412 bp, Gossypium hirsutum
  Clone ID: LIB3493-024-P1-M1-E11
cccacgcgtccgctcaaccctaccgagttcaatggacccggtgtgggcgattcacgaagatcatgttgtcccaaaaggttccgaaattggtactcttggttttggttttgaaggtggtcctgaaaaatgttgttcttctggatgttccggtaattgtaatcctggtggtttcgttctaccatttcctcaaattccagaaatcccaagaattccacagatcccacagatcccacaaatcccacaaattccactaatcccacagatcccacaagtcccacaaatcccactaatgccaggacagtcgggatgtgagagtggggagtgttaccgtcagggttgcggggggacttgtgctgagtgtggtcagcccaggtgcgcatcatgatgttgccaggctgaaactgtatagagc

SEQ ID NO: 295 - DNA, 368 bp, Gossypium hirsutum
  Clone ID: LIB3493-024-P1-M1-E12
ctcagctcttcttttcatttgcatgcttttcatttcctcagctgctccagttcttggttgtcgttcatgtcgtaaagcacatcccaaggctaagcctattaaaaagccccatcctgttaaacccccaatccatgtaaaaccaccggttacagtccctccagtcactgtcccaccagtgacagtccctccaatagtaaaaccaccagttacagtcccaccagtgactgttcctcctgtgaagccaccagttgaactccctccgattgcaaaaccacccattacagtcccaccagtgactgttcctcctgtaaagccacctgttgatctccctccaattgctaagccacccattacggttccaccagtga

SEQ ID NO: 296 - DNA, 411 bp, Gossypium hirsutum
  Clone ID: LIB3493-024-P1-M1-E2
gacaaaaacatcatccctttcgtgataatgaagacagtcttcactattttctcgggacttgtatccaccgtaatctccaccgtcaacggctgccctccgtcggaccgcgctgcgctgctagcattcaaagcagctctccacgagccttacttgggcatcttcaactcatggacgggcaccgactgttgccgcaactggtacggcgttagctgcgacccacagtcacatcgagtcgccgacattaatctccgtggtgagtccgaagatcccatctttgagcgagctcaccggaccggttttatgactggttttatgtctcccgaaatatgcaagctaactcgcctctctagtcttactatcgctgattggaaagggattacaggcgagattcctaaatgcattaccagtcta

SEQ ID NO: 297 - DNA, 179 bp, Gossypium hirsutum
  Clone ID: LIB3493-024-P1-M1-D7
aacacattttcagattactagcgaggttgcactcgcataacccaggcgaggacatctgataacttagcttctgaaaaagttcatgaactacatgtgtatgagttgaatgagatagatcgtggtagtccaccttaccttgacatgagtcagaaatctgtgaactcactgggtgatcttgt

SEQ ID NO: 298 - DNA, 401 bp, Gossypium hirsutum
  Clone ID: LIB3493-024-P1-M1-D8
aaaagctcgtgtttaatcatcataatgactagcattatgggcacagagggtgataagtatagcacgattaacttcgaagagacggagttgcgtttagggttgcccggcgccaatggaaacgacggtgaaactaccaaaaacaacggaaaacgagggttctcggagaccgttaatttgaagcttaacctttcatcaaaggagactgtagccgaggattccgacaagatgaaggagaagagctcaactgaccctgcaaagccacctgccaaggcacaagtggtgggatggccaccagtcaggtcattccggaagaacatcatggccgtccaaaaagccagttccgaggaggaaggtggcagcaagaaggccggaaacagtgcagccgccattactaccaccac

SEQ ID NO: 299 - DNA, 416 bp, Gossypium hirsutum
  Clone ID: LIB3493-024-P1-M1-D9
cggacgcgtggggaaaatagttctcaatgaagcccaggctcattcatctgttaagaacttggattttagctgtgatggaaaatttcttgtgtcactgggaagtggcctttgtaggatttgggatgtaacttcgtcaaaagttgttgcttctctggcaaagggaaatgatgaggtttttgccttctgcagattttctcaaattaatgataagaatccacatctgtatattgctgcagtcacagactcatggtgaagtattttaacatataacacaaccacatggaaaagaattcgctcaagccgagtagtccgggaagctatctctgcgttcaatggctcgtctgaatgggagttccctgcagttggaacagtcggaggagacctttttatcatagattctgccaatatgcgggttc

SEQ ID NO: 300 - DNA, 438 bp, Gossypium hirsutum
  Clone ID: LIB3493-024-P1-M1-E1
ccttatttgctctccataaccaaagcttccacgtccgccaactgctcaaacgaggttctctaaacaacatgatggcttcaatattcggacgaaaatataacttaaattccaccagcaatgaagtcgaacaacttcgagctttggttgaagaaggctacgatttactgggctcattaaattggtccgaccatcttccatggctagccgatttcgaccctcaaaaaatcagagttcgatgctccaaccttgtgcccaaagttaaccgctttgtggcccgaattatatcccaacacagacacaaaacaaactgcgaaacacatgattccttcgatgttttactttctcttcaaggtgccgataaaatattcagactccgacatgatcgccgttctgtgggaaatgatattcaagggagctgataccggtgcggtcttgatg

SEQ ID NO: 301 - DNA, 410 bp, Gossypium hirsutum
  Clone ID: LIB3493-024-P1-M1-D12
cggacgcgtgggcggacgcgtgggcggacgcgtgggcggacgcgtgggaaaaaaattgtttttgtttgtaaaatataaacttacgacatctacaaatggtgacctcggtgctacctagagtagaaagcttggcacgcagtgtgattcaatcaatcccgaaagaatatatcaggcctcaagaagagcttacaagcataggtaacgtgtttgaagaagagaaaaaagtggaagggccttaggttcctaccatcgatttgacagatatcgagtcggaggacaaagaggtccgggaaagatgttaccatgagctgaaaaaggctgtcatggaatgacgtgtgatgcaccttgttaaccatggcattttcgaggagctcatggatcgagttatgaaagatgggcaaaaattcttt

SEQ ID NO: 302 - DNA, 376 bp, Gossypium hirsutum
  Clone ID: LIB3493-024-P1-M1-D2
gctcaactcaacatgtcaccaacgctcctgtgcggatcttcaactctgatgagaagtgtgagggtgttgcttcatccgaggaggatcaagaaaatagcggcggagagactgaacttcctgaatttgatccgcgtgttgaagaccgagaactgaagaaccacctattgagaaaatatagtggttatttaagtagtctcaagcaagaactctccaagaaaaagaagaaagggaaactaccgaaagaagctagacaaaaattgctaagttggtgggagttacactacaaatggccgtacccgtcggaatcggggaaagtggcattggctgaatcaactggttttggaccaaaaaacaaatcaataattgggtcataaat

SEQ ID NO: 303 - DNA, 462 bp, Gossypium hirsutum
  unsure (1)..(462): unsure at all n locations; Clone ID: LIB3493-024-P1-M1-D3
atcgtaactgccctttttcttcttccttcttccttctcctttcttcacagtaaaagcctcaaacaacactctttcactttgtcctccatttctctatttctctctcttctctcaaatttcccttttttctttttgtagcgtttcatttcttctcagtccgataaaggacggagaattcctttttttctctgttttatcaatcaatggtctttcattcaatctcagaaacgagaaataactcgaacgaaaccgtaaccgaaaccgaaggtgtggtgatggcttcttcttcgaccttgaaatctcagcctcttcataactttcaattacatgacctcaaatgggccatgaaccacagtaacaatcaacgccttcgaaagctcgctgattcctctcagaaatctcctcagcgcagcgataccgataccgactccgancataacccgaaagggaatacagtgcggg

SEQ ID NO: 304 - DNA, 163 bp, Gossypium hirsutum
  Clone ID: LIB3493-024-P1-M1-D5
gctgatttggtgtttgttgcattcaattcaacggttcaaagtttcccaaggaaagaaaaatgtgttgtttgtgggaatcccgtgagattgtctttgaaaaattcggtttcaaaggcattgtcgaggttgcattgttttccatggctagaaaaaatggatggtt

SEQ ID NO: 305 - DNA, 505 bp, Gossypium hirsutum
  unsure (1)..(505): unsure at all n locations; Clone ID: LIB3493-024-P1-M1-D6
atcgcactgtgcaccttccgacccagttcttgacccattgctttatttgtgggctccgcgctgacattaaacactcagttttggtccataaaccagccactttgcctgaggccatgcatctagcctagctccatgaacaacgcattcagctggaacgtaggttgcttaaacccagcctgggtggttccaaaccattattaccaactcccaaacaatctcctggtacttcagtatcttctccttccactccaacaacaaccgcaactttgcccaatggtaaccgcgttccgtttcgtcgccttactcctactgaggctgcccaccgccgttcacagggcctttgttatcattgtgatgagaagtacgagtggggacacaaatgcaaagcaaaatcccacatgttactcttagaggaatagttcgagccacctgatgctctcgcgcctgaatntttatcgccatcttcaccctttgtaccgattcaccacacttgacaccatcttac

SEQ ID NO: 306 - DNA, 332 bp, Gossypium hirsutum
  Clone ID: LIB3493-024-P1-M1-C9
cggacgcgtgggcttccgaggaacaccaaaaccttcttttgttttcttgttctaatcaatggcatcttccatagctacaactctcacttcctcttcaaagctttgcaggaacacttctctcttcgagtcttccttccatggggttccaattaaaccactttcttttcatttcaaaacaaagtcttccccgtgcaacgcatccatttccatgtctgcagcatcacctccaccctatgatctgaataatttcaggtttgaccccatcaaggagtccatcgtctcacgtgagatgacacgcaggtacatgatggacatgatcacctatgctgata

SEQ ID NO: 307 - DNA, 421 bp, Gossypium hirsutum
  Clone ID: LIB3493-024-P1-M1-D1
cttcaaatcgcagggcttttttaagctctccctctctctctagaaccctgactagtcttttcttttgtttgtttatatggcatctcaagccagcctcctcctccaaaaacagctcaaagatctttgtaagaatccggttgatgggttctcggccggattggttgatgaaaacaatatctttgaatggagtgttacaattatcggaccacctgatactctttatgaagggggatttttcaatgccatcatgagccttccgcccaattatccaaacagccctccaacaatgaaatttacatcagagatttggcatcctaatgtttatcctgatgggcgtgtttgcatatcaattcttcatcctccaggtgatgatccaaatggttacgagcttgcaagtgagcgctggatgccagtccataca

SEQ ID NO: 308 - DNA, 182 bp, Gossypium hirsutum
  Clone ID: LIB3493-024-P1-M1-D10
aagacgcatggtgaaaatatttctcaatgaaccccattctcattggtgtggcaataacttagattttagctctcatcaaaaatttcttttctcactgtgaagtccccttcctaatattacttatgtaactctatcaaaactctttactttttttgcaaatctgaaattcattattttttcac

SEQ ID NO: 309 - DNA, 487 bp, Gossypium hirsutum
  Clone ID: LIB3493-024-P1-M1-D11
cggacgcgtgggaggatatacttgtgggcctgccaagattgtgaaacccactaaattcataacggctgataaaaggagaataactcaagctatgatgacatggaatgttacatgcacatattcccaatttctggctcaaaagactcctacatgttgcgtctcgctctcttccttctataataacactatcgtgaattgcccgacatgtgcttgtggctgtcagaataactcaactgaatctgggagttgtgtaagcgaaaggtcttcacatttagcttcagctgttccgggcaaatctaccaatgcaccacctctgcttcagtgtacgagccatatgtgtccagttcgaattcactggcatgttaagctcaactacaaggaatactggcgtgtgaagatacaatcaccaatttcaattacgcattgaactacagtcagtggaatctagttggtgcacaccccaacttttgacaatttacacaacttt

SEQ ID NO: 310 - DNA, 233 bp, Gossypium hirsutum
  unsure (1)..(233): unsure at all n locations; Clone ID: LIB3493-024-P1-M1-C5
gtttccaaccaataccaactccctttcccctaatttctattttattttaggtgcattttccccttctctctctctctttataatctacccctctacacccttcacaacttcagggctcatcctcaaaagaaaaaaaaaaggaaaagaaaatcaaagttatttttctttcaattgagcccttcatttttctctcattttctttcttcccaaacaacantattttaaagaaaatg

SEQ ID NO: 311 - DNA, 386 bp, Gossypium hirsutum
  Clone ID: LIB3493-024-P1-M1-C6
aatctgcaaccaaacccaggagctgaattattgaattccctcccttgaaagcgatcatggatctagcgccggaggagcttcagttcttgtcgttgacagatatcctgagggaatccgttgcaatccccaaaagatcccccaaaaccttctatcttataaccttagctctcattttccctctctcttttgccattttagctcactcgcttttcacccatcctatcttaaatcaactcgcttccgatccgctggcagacccgtcccagacccgccacgagtggactctcctcttaaccttccagttctgttacctaattttcctctttgccttctctcttttatctacggctgcagttgtatttacggttgcatctctctacacgtcg

SEQ ID NO: 312 - DNA, 452 bp, Gossypium hirsutum
  unsure (1)..(452): unsure at all n locations; Clone ID: LIB3493-024-P1-M1-C7
ctttccccttttcttatccctctcgtaaaagcacatttttcctgaaccgtgtatatatatgtatgtggctttaaacttcaaaaccagacatccaagaacaactcaacttttttctattttcagacagtgattgttctctaaaagaaatgggtaggtttcgtttgttttggttattgtttgtttgggtgttgggaattgagaggggtgtatcaggtttggcctgttaatggaggttgctgncgattcattggctgacccgtaccatacccgccacgagtgtactctcctcttaaccttccaattctgtgacgtaattttcctattcgcctgctctcttggatctacggatgcagtagaatttacggttgcatggatttacacgtggaagccagtctctttcacttgaacgatctcagccatactcaaggttgttaagcgcctttttataacct

SEQ ID NO: 313 - DNA, 364 bp, Gossypium hirsutum
  unsure (1)..(364): unsure at all n locations; Clone ID: LIB3493-024-P1-M1-C8
gcggcggcggtggtgttttcaggtgaaacacgctcggtggaagcagtggggtgcagccccatcgagctcatcccatgcttgccggcaatctcaacaccgccaaagcctccatccgccgcttgttgcggaaaggtgaaggaacagctaccatgcttttgtggctaccttaaggacccaagtgctaagccattcattgacaatcccaatattccaaaggtggctagctcttgtggagttgcacatgcatatcctcctaagtgttaaaatggtgctttcattagagcatttcccactcaaggactagtatgaataaattaataataaaatggaaaattatctaatattttactcaananaaaataaa

SEQ ID NO: 314 - DNA, 394 bp, Gossypium hirsutum
  Clone ID: LIB3493-024-P1-M1-C12
tcgtgactttgtagttacttctgatggaagtaaggtgccggtgtgcgaacttgaggggaagactgtaggtatatatttctcagcgtcttcattcaagccatctgctgattttactcaacaacttgctgaagtttatagtaagttgaaagaaaatggggagaaattcgaggttgttatgatatcgcttgatgatgatgaggaatccttcaagcaaagctttggggcaccatggttggcattgccttcgaaagacaagagctgtgagaaattggctaggtacttcgagctctcgacccttcccactgttgtcattatcgggccaaaatggaaaaactctccaccctaatgctgctgatgcgattgatgaacatgggattgtggcctaccccttcac

SEQ ID NO: 315 - DNA, 80 bp, Gossypium hirsutum
  Clone ID: LIB3493-024-P1-M1-C2
gggcggttcagtataactgtcagttagacattggatatgtggaggcttgcatactcaatgtcagaccaagctatgaaaca

SEQ ID NO: 316 - DNA, 248 bp, Gossypium hirsutum
  unsure (1)..(248): unsure at all n locations; Clone ID: LIB3493-024-P1-M1-C3
cggacgcgtgggaaaaaatcgtggaggaaaccaacaagaaccaagcggtggttcttgccctctatgaagccttaaacacacgagacgtcaacaccgttcaccaaatccttgctcccgatctagagtggtggttccacggtccacccactcnaccagttttgatgcgcttactcaccggcgcttcatccgacgatcctttccttttgaggtcgaccctgtntagtcaccaccttgatccaccgcatcgt

SEQ ID NO: 317 - DNA, 111 bp, Gossypium hirsutum
  Clone ID: LIB3493-024-P1-M1-C4
gtggtgtagagcaattagtgcttgtaacacgaaacttacctaaaacggagtgcggacagactaccagagcgtcaggctaaacatatatatcacctacttataatgcaacag

SEQ ID NO: 318 - DNA, 333 bp, Gossypium hirsutum
  Clone ID: LIB3493-024-P1-M1-B8
attcacaactccaggagctcttcagtacctcagtggtgttattctctttgaggaaaccctttatcaaaaaaccgcttcaggcaagcccttcgttgatgttttgaaggaaggtggtgtcctccctggcatcaaggtcgacaagggtaccgttgagcttaacggaaccaatggcgaaactttcacccagggtctagatggccttgcacagcgatgccagaagtactatgaagctggtgcccgctttgctaaatggcgtgctgtccttaagattagtgctaatgagccaaccgagcttgcaatccaagaaaatggccaacggctagctatgtatgc

SEQ ID NO: 319 - DNA, 390 bp, Gossypium hirsutum
  unsure (1)..(390): unsure at all n locations; Clone ID: LIB3493-024-P1-M1-B9
cggacgcgtgggcggacgcgtgggcggacgcgtgggcggacgcgtgggcggacgcgtggggcacgattaccgactgggagtcttcaaggctaacctgcgtcgggccaagcgtcatcagctcctggaccccagtgccgtccatggcgtcacaaagttttccgatttaactccatcggagttccgccgccagtatctaggcttgaaaccgctcaagctcccagccgatgctcaaaaggctcctatccttccgactgacaacttaccggatgactntgactggcgtgaccacggggccgtcactggcgttaaagaccagggttcctgtggatcgtgttggtcgtcaatgcgacgggggctttggagggagcccattatttggcgacaggagag

SEQ ID NO: 320 - DNA, 157 bp, Gossypium hirsutum
  Clone ID: LIB3493-024-P1-M1-C1
cggacgcgtggggtggtgctgagatcatcaagtcagaccccgttgtgtcgttccgtgagactgtccttgagaggtcttgcaggactgtgatgagcaagtctcctaacaagcacaaccgtctgtacatggaagctcgacccttggaggaaggtcttgc

SEQ ID NO: 321 - DNA, 365 bp, Gossypium hirsutum
  Clone ID: LIB3493-024-P1-M1-C10
tgttgacctcaaatcacataaagatgtagctctaaatggtgatctggaagaaacaataaaatcaaatcatgcagagaaaaaacctccatctcacgagaagagtaaaactcggcatccttccagtttacaagtaaagttcgaagaaaagatggccagagctatgtgtaatggaaataaaaaatctcaattggccgattcggcacaggaagacactggtatagggaacaccactgaaataacagtgtcacaaaagtttgaaaatgatgaagccacccaatatggcagcgagggaagaaaaaataagcttgatgagatacatggattgagctcaaattatgtactggataacttaataagaaatcaca

SEQ ID NO: 322 - DNA, 404 bp, Gossypium hirsutum
  unsure (1)..(404): unsure at all n locations; Clone ID: LIB3493-024-P1-M1-C11
caaaatgtcagctcttcttttgctttgcatgcttttcatttcttcagtgacaccaattcttgggtgtggttcatgtgggaaagcaccacacaagcatcgaaagcctaagggaaagtcccctaaaggtcccatcactttgcctccccttgtgaaacctccaatcaagttgccaccggttgttcctccaatagttaagccacccattgacctccctccggttacagtccctccaattaacctccctccagggacggttcctccagtaactaagccaccaagtgggaaaccctgcccaacaccaccaaccaaggacacttgccccattgacacactngaaatgggtgcttgtgtggatctgcttggagggttggtgcacattggactaggtgacccggttttgaatc

SEQ ID NO: 323 - DNA, 389 bp, Gossypium hirsutum
  unsure (1)..(389): unsure at all n locations; Clone ID: LIB3493-024-P1-M1-B4
atcctgcgacggatcctttatcgctgtcactcaagctgtctttgcaatgcgatcaaatggattcatcatcatcttcaacttccaggcattctccatttcaggtgatgccaaactttagcagtggagataacaataacatcatcagtgttgcttaagaatgacaataattatataataagcaaaagcgacacaaagcttattattattagagcttaaatttggatttagagaaaataaaaaaaaagacataagtttaaattaggtaactggtttttgaatccctttgtttttcatgtacagactaaaaacagaacaaaactgtcatgtcttgtttgcttctgatggtttctgtttttaattatgttagattaatgcttcatttnnnaaaa

SEQ ID NO: 324 - DNA, 351 bp, Gossypium hirsutum
  unsure (1)..(351): unsure at all n locations; Clone ID: LIB3493-024-P1-M1-B5
cggacgcgtggactttttttctcgacatctcttctttattttcttcacgcgcccctctaacattttctctctttttttctttcttaattttcgaatatcatgcatatttccaggtcaaacatgttttcatctttccatagtcgggttttgcttgaagatcttaattattgttgtttgattaaagctttcatctgttttagttgattgtcgtccttgttttntcgtgatttccatgttattttttttttgtagattccaattctgggtaattaaggttaaatggtaccttttttctttgtaatttgacgttgtgtgtgtaattttagggttcagggtaaattgcttcttctt

SEQ ID NO: 325 - DNA, 458 bp, Gossypium hirsutum
  unsure (1)..(458): unsure at all n locations; Clone ID: LIB3493-024-P1-M1-B6
cccacgcgtccgnggacgcgtgggtttaacctctcgctataagatacagagtaaaatgggcgaaggtaccttgggtctggttttagaatgctgggatagagagaggaaggagatggttgccataaaaattgtccgtggagttaagaagtatcgtgaggcagccatgatagagattgagatgttgcaacagcttagaaaacatgataaaggtggcaaccgttgtgtgcaaatacggaactggtttgactattcgaaccatatttggattgtgtttgagaagcttggaccaagcttatacgattttctacgcaaaaacaattatcgctcatttcccattgatctttgccgtgagattggcagacaactattggaatgtggagcattcatgcatgatttgaacctgatacacacaaacttggagcccgaaaacattcttctagtctcttcagaagtacgta

SEQ ID NO: 326 - DNA, 496 bp, Gossypium hirsutum
  Clone ID: LIB3493-024-P1-M1-B7
cgggaattgactgctcttaaggctgtgattaagtgcattgaagaacatgagctagaggagcaataccctgtcgatccacttcagaaacgagttctcctgttagagaaagcaaaagcagacaagaaaagggcaaccgaagttgcaaagcctcaacccaagaggcctcgtgctaatggtgccggatatggtcctcgagtcactaatatagctgctgacaaaacattttatcccagagtcactgacaggtacatgcagtacgtgtatgacagaccctatgtttacgccggacctgctgacaaccacagccactctcttcttgcttctgctacctacaacttctctcctagtcatgggaactacttcggaaacgggtaccagtatcagactccgtatcttcactaattcccaaaaatggcataaaggtaactatgatcctctcacttttactggtagctttaacctttcaggtgcagtgtatgaaaggaattagtatttt

SEQ ID NO: 327 - DNA, 367 bp, Gossypium hirsutum
  Clone ID: LIB3493-024-P1-M1-B11
atcacaaaagcaactttcaccgaacacattacaacagtaaaaaaaagacatggatgatcaagagaaagctgatctagaacgcattttcaagcgattcgatgccaatggggacggcaagatctcatcagcggagcttggggatgccttgaagacgctcggatcggtcacgccggaagaagtttcgaggatgatgagcgagatcgacaccgacggagatggctttatttcctatgacgagtacattgcattcgcatctgccaaccgtggcctaatgaaagatgttgctaaaatattttaatttttttttattataaatcatttgcaaatgattcactaattagtgaaatttcaattttttttactcgag

SEQ ID NO: 328 - DNA, 356 bp, Gossypium hirsutum
  unsure (1)..(356): unsure at all n locations; Clone ID: LIB3493-024-P1-M1-B12
aactgaaagaagatgcaacagcaaaggctaaagcagcaacatgctctgatgcaacaggtgtacccaaatcccagtctcatgggtagtcctcagatagagcctatctcgagtggaaatcttcctcctggctttgatgcatctacttgccgtagtgtatacgtagcaaatattcaccctcaagtcacggaaccctttctgcaagaagttttcttgagtactggtcctattgaaggatgcaaacttgttaagaaagataaggcaacctatggttntgtggactactttgatcgcggatcagctgcccttgctattgtcactcttaatggaggcagctatttgggcaacctaataaagtt

SEQ ID NO: 329 - DNA, 474 bp, Gossypium hirsutum
  Clone ID: LIB3493-024-P1-M1-B2
gaagaattttgaagttgaaaacaaactcgaacccgacagaaaatcgaaactagctgaagaacttgggttgcagccacgacaagttgctgtctggtttcaaaaccgacgtgctagatggaaaacaaagcaattggaaagagattatggagttcttaagaccagttatgaatctcttaagctcaattatagtaacctccgccatgaaaatgaagatcttctcaaacagattagtgagctgaaggcaaaactcatcgagccgccgccgggttcatctttgggtacctcattggagccggcggaagtgaactgcgagagcttcaacgacggcggcggcaatggatcagttggtggtggtggcgacaccgttttcccggacttgaaagacggatcatcagatagtgattcgagcgctatcttgaatgaagaaaacaacagcggcggagacatggaggggggcaggccaaacaacggggc

SEQ ID NO: 330 - DNA, 381 bp, Gossypium hirsutum
  unsure (1)..(381): unsure at all n locations; Clone ID: LIB3493-024-P1-M1-B3
cggacgcgtgggctctctntcccgtctctgcatttacgttctattttttggttagatttatttttttaaaaaaaactaaagggatttgagttcgtctggatttgaagtactttcttgagcatatatggaccgtgctgaactatccactgaacaggttctgaagagggacatcccatgggaaacatacatgacaactaagctgatttcaggaacaggctngcagctgttaaggcgttatgataatagagctgaaagtgtcaaggcacagttgttggatgatgatggtccagcctatgttcaagtgtttgttaacatcttacgggatatctttaaagaagaaacaggggaatatgttctggctttaaatngatgaaatgctta

SEQ ID NO: 331 - DNA, 364 bp, Gossypium hirsutum
  Clone ID: LIB3493-024-P1-M1-A7
tagctcattactttgttgacgcccttgaagcacgcttagctggcactggaactcaaatttatacctctctggttgctaaaagaatgtcagccgctgatatgttgaaagcttaccaagtttatatttcagtctgcccattcgtgaaggtgcctattatttttgcaaacaactacatttcgaaggcagcagagaaagcaacaaagctccatatcatagactttggtattttttatggttttcattggcctgctttaattcactgcctcgcaaacagaacctgtggtcctccaaagttacgcattacgggaatagagtttccccaccctggcttccggcctgctgaaactgtgcaggagacggggcg

SEQ ID NO: 332 - DNA, 414 bp, Gossypium hirsutum
  unsure (1)..(414): unsure at all n locations; Clone ID: LIB3493-024-P1-M1-A8
accaacaagggattaacatggatgaccaaaaaccttatagaagtttctttcaagtgatggtttcgttgttggatacacccataaaccctaacgataaagatcaaccctacatcattggtagagaaaacatcaaggctataatggtggacatggtggcagcttccttcgacactacatccacggccattgagtggacatttacagaacttctaaagcatcctcgagtcatggttgctctccagaaagagctagaaagtgttgtcggaaggaatagaatggtagaagagtcggacctaccgaaacttgcctatttggatatggtcatcaaagagagtttcaggttgcatccggcggcaaccgtgtagtnccgcacgagtcgaccggaaatgtcaccgttaaatgggtatttcatac

SEQ ID NO: 333 - DNA, 306 bp, Gossypium hirsutum
  Clone ID: LIB3493-024-P1-M1-A9
ctcttctctttttccagttttcttcttctttgttctttttttttttcctttttttttcttctctcactttctcgaggcctccatactttgaaccctagctggagaaaaaaaccgtaattttcttggaaaccgaacacctcgattaatttatctccagtcaatcgccgagaaaaaaaaatgcagcaccagaggctgaagcaacagcaacaagccttgatgcaacaagctcttcttcaacagcagtcttttttatcatcccggcattttaagctcctcctcagatagaagccaattcccagtggaaat

SEQ ID NO: 334 - DNA, 174 bp, Gossypium hirsutum
  Clone ID: LIB3493-024-P1-M1-B1
ctgacgatttgtgctttttccagattagatccaacatctccttttcatcgtactgtgggattcttcaacttactccagccgactatttcaagcaaaactgtgtcagatctacatgatctataaactgacgtcccattagcagtccgacgatctaatacttcgatcttatcactt

SEQ ID NO: 335 - DNA, 338 bp, Gossypium hirsutum
  Clone ID: LIB3493-024-P1-M1-B10
cgtattccacctccaggaagcatgccatcctttgaggaaatcaagggagagcttaggtttcaataattactacgaagaagaaaaaagatatgctaccagcaagtatcaactatatgctgacagagagggcagtaatgcatacagtatacaaagggttcgagatgactcagaacaaagaggtcaaagtcctcaagatccagttgttgaggtgataactcctgatgtatacactaaatatggtgcagatggttcaagggatcctttttctggaatctggtctcggacattgagaatcaaaattactggaagagatggatttgagaaacctgatgttagag

SEQ ID NO: 336 - DNA, 444 bp, Gossypium hirsutum
  Clone ID: LIB3493-024-P1-M1-A3
ttctattcagttttgtaagagctatggctaaggacattgaggttggtggtgagttgcaggccaaggactaccatgatcctccacccgctccattggtagacgctcaggagttagccaagtggtctttttacagggctgtcatagctgagttcattgccactctcctctttctctacatcactgtcttgactgtgatcggttacaagacccagaccgaccttgctaagggcggtgaagattgtggaggcgttggcattctcggcattgcttgggcttttggtggcatgatttttatccttgcttactgcactgccggtatctctgggggacacatcaacctagcagtggaccttggacttttcttggctaggaaggtgtcgttagttcgagccatattttacatgggtgctcaatgtttgggagccatatgttgatgtgggctgg

SEQ ID NO: 337 - DNA, 309 bp, Gossypium hirsutum
  Clone ID: LIB3493-024-P1-M1-A4
cggacgcgtgggctttccctgaaaaactagagataaaatcaatcatgggtcgagggaagatccagatcaagctgatagagaactcgaccaacaggcaagtcacgtattcgaagagaagaaacggtcttttcaagaaagctaatgaacttacagttctttgcgatgctagagtttcgatcatcatgttttccactactggtgaactccatgagtttatcagcccttccaccacaacgaagcaagtaattgatcagtaccagaaaaccttggggatcgatatttgggacacccactttgagaaaatgcaag

SEQ ID NO: 338 - DNA, 247 bp, Gossypium hirsutum
  unsure (1)..(247): unsure at all n locations; Clone ID: LIB3493-024-P1-M1-A5
gtgaactgaataaaccgattgacattatattctcaaggttctgacttagtagtgcatctaatatttatcaggttgacatggtaatagttccagcaacaactggacagatgggtgttttgcctggtcatgtccctacaattgctgaactgaaacctgngatcttgtcggtgcatgaaggaaatgatgtcacaaaatatttccttagcagtggttttgctcttattcatgccaactctgttgcggatat

SEQ ID NO: 339 - DNA, 319 bp, Gossypium hirsutum
  Clone ID: LIB3493-024-P1-M1-A6
gcaaaagctcaatagaagttgtaaaacatctgcaagagctcaaagaattgcatctagttttagcctgaatatgacactggtgtaaggaatgttgccacgcaattgacagccctggtggtttggttttggctatttcagatgtctggcagaagcttttataaaaaaaaaaacacgtgattgaagccatgaacctggtgcatctgcaatttaacatgggacaaaagtgtaagaattttatgttttcaactgtaaagctgtagttaaagaaaatgtggtcattggtagcaggtgagaatatttcttaactggttacaagagt

SEQ ID NO: 340 - DNA, 423 bp, Gossypium hirsutum
  Clone ID: LIB3493-024-P1-M1-A1
ggcaagctcttgtctttgtctttagacagggtttcagggtctggttttaaatccaagaaagagtatttgtttggaaggattgatatgcaactcaagcttgttgctggcaactcagctggcactgtcactgcttattatctgtcatctcaagggccaacccatgatgagatagactttgaattcttagggaatctgagtggtgacccttacattttacacaccaatgtcttcacacaaggcaaaggcaacagagaacaacagttttatctttggtttgaccctacaagaaacttccacacctattccatcatttggaaaccccaacacatcattttcttggtggataacatccccattagagtcttcaaaaatgctgaatccattggtgtaccgttcctcaagagccaacccatgaggatttac

SEQ ID NO: 341 - DNA, 232 bp, Gossypium hirsutum
  Clone ID: LIB3493-024-P1-M1-A10
atccggagcttctctaggtgtctaaaagaatggactatattcggggcgggattttatattatatgactgtgtggaccccttcatactttaaaccctatctgaagaaaaaaaccgtaattttcttgcaaaccgaacaccttgtttaatttatcttcagtcaatctccgacataaaaaaattcactaccagatgttgtttccacagcatcaagcctttattcaacaaacttttt

SEQ ID NO: 342 - DNA, 326 bp, Gossypium hirsutum
  Clone ID: LIB3493-024-P1-M1-A11
cttgagacattgattctcgacttcaatgagttgactgggacaataccttctggcctaagcaactgtaccaagttgaattggatttcattatccaacaaccggttgactggtgagattcctgcttggcttggcaagctttccattcttgctatcctcaagctcagcaataactccttctatggacgaatcccgctggagctcggagagtgtaaaagcttgatatggttggaccttaatactaataacttgaatgggaccatccctcctatgctgttcaaacaatctggtaaaattgctgtcaatttcattggttggaagaggtttac

SEQ ID NO: 343 - DNA, 285 bp, Gossypium hirsutum
  Clone ID: LIB3493-024-P1-M1-A12
cttgagacattgattctcgacttcaatgagttgactgggacaaggcctggtggcctaaacaactgtaccaagttgaattggatttcattatccaacaaccggttgactggtgagattcctgcttggcttggcaagctttccattcttgctatcctcaagctcaacaataactccttctatggaccaattccgcttgagctctaagagtgtaaaagcttgatatggatggaccctaatactaataactttaatgagaccattccttctattctgcttaaacaaatt

SEQ ID NO: 344 - DNA, 397 bp, Gossypium hirsutum
  Clone ID: LIB3493-024-P1-M1-A2
tcaggcttaatgactagagacacgcgatactgtcgctcttaacaaggtcttgcacgacaagatatacaagaaccgtgaattgcaaaccatgcgtcttctagaccaccccaatgttgtctctctgaagcattgtttcttttcaactaccgaaaaagatgagctctatcttaacctggtgcttgagtatgttccggagaccgtccaccgagttatcaagcattataataagatgaaccaaaggatgccactgatatatgttaaactctatttttaccagatttgcagagcacttgcttacattcataacagtattggtgtgtgccacagggacataaagccacaaaatttattggtcaacccgcacactcatcagctaaaactgtgtgattttggaagt

SEQ ID NO: 345 - DNA, 258 bp, Gossypium hirsutum
  Clone ID: LIB3493-027-P1-M1-A10
cctcaagttaactactcccaggtttggtgatattaaccatctaatttctgccaccagagtggtgttacatgctgcctccgtttcccgggtcagctaaactctgacctgcgcaagcttgccgtattcttcattccgttcccccgactacatttcttcatggtcggattctcgcctctcacgtctcgtggatcccagcaatacagagcactaacagttccagaactaacacaacaaatgtgggatgcctagaacatgatg

SEQ ID NO: 346 - DNA, 376 bp, Gossypium hirsutum
  unsure (1)..(376): unsure at all n locations; Clone ID: LIB3493-027-P1-M1-A11
aaattctgctctccacattgcagacttgcaagtaacacttgcactattgatttgaattgatcggtgagaggaccaaatcccaggatcggattgttggggctcatttctttagtccggctcatgtcatgccactattggaaattgttcgtaccaggcaaacatctccccaaataattgttgacatgctcgatgttgggaagaaaataaagaagactccaattgttgttggcaattgtacaagttttgctgtcaataggatgttcttctcttctacgcaattaggccttttccttgttgaacggngaactgatgtttatcggattgatcgagtaattaccaagtttggaatgccaatgggcccattcaggttggctga

SEQ ID NO: 347 - DNA, 380 bp, Gossypium hirsutum
  Clone ID: LIB3493-027-P1-M1-A12
ctgatattcccatggttgtgcggcggatatttgaacaaggagctggggctggatatgacaagttcatcacacactctgtgccttttgccgatattaacaaggcattcgactacatgctccagggtataggtctgagatgcatgattcatttggatgcttaaggaaatgttgctgctgtatatttgcccatccaaggatcaaaactctaatgttttgtcctactatgtgttatattatgtgcctacttaagctacctttcccggttatcaagagtgcctatatagaactctctctctcaaaaaaaaaaaaaaaaaagagaaaagagttctttatatggagttttatattatatgctgagagaataaattatcttgtaaaag

SEQ ID NO: 348 - DNA, 388 bp, Gossypium hirsutum
  Clone ID: LIB3493-027-P1-M1-A2
gcatctcatcgcattttattggggttgtctctcaaatcttgaagatgtatacatcaatgaaaagatccacaaagataaggatgttgaaccaacagaatttgaggaatcagttgcccaggcattcttcgatttggagaataccaaccaggatctgaaaagtgacctcaaggatctctacattaattcagcagtccaaattgatgtgtctgggagcaggaaagctgttgttatccatgtcccgtaccggttgaggaaagcttttcgtaaggttcatgttaagcttgtgagggagcttgaaaagaagttcagtggaaaggatgtgattcttattgctacccggaggatattgaagcccccaaagaaaggttctgctgttcagaggcctcgc

SEQ ID NO: 349 - DNA, 390 bp, Gossypium hirsutum
  Clone ID: LIB3493-027-P1-M1-A3
ccaacaccaaaatgtcagctctgcttgtgctttacatacttttgatttcttcagtgacaccaatcttgggtgtggttcatgtgggaaagcaccacacaagcatcgaaagcctaagggaaagtcccctaaaggtcccatcactttgcctccccttgtgaaacctccaatcaagttgccaccggttgttcctccaatagttaagccacccattgacctccctccggttacagtccctccaattaacctccctccagggacggttcctccagtaactaagccaccaagtgggaaaccctgcccaacaccaccaaccaaggacacttgccccattgacacactgaaattgggtgcttgtgtggatctgctgggagggttggtgcacattgtact

SEQ ID NO: 350 - DNA, 322 bp, Gossypium hirsutum
  Clone ID: LIB3493-027-P1-M1-A4
gaccaaccaacattacaacaactgtagtatttacataaagacagcgactcatcctttcatcaaattcatcaaatctttcattcttatattctcttactttcttcgttctcatatcttcagggcctttcatttgaatctcatccacatctctcctatatttctcagccatctctccacatgctataagaagaagactccatcccaatcttttcttaaagactacccatatcttcttcttcttttttgtcagaagaaaaaatataccaaaatcccatattttgcttaaaaaaaaattccaattctgctggtttttacccctcca

SEQ ID NO: 351 - DNA, 237 bp, Gossypium hirsutum
  unsure (1)..(237): unsure at all n locations; Clone ID: LIB3493-027-P1-M1-A5
aaaaaagagagatggcgtctgtaagaaaatcttcaatcttaattctgtccccntttttactgtacgcttcanttcgggtgttaggttgctccaggaacagcccaatgatgaccgcaaaaacatgttctctattcctcccattgatgcactcaaccctaccgagttgaatggacccggtgttggcattcactaatatcatgttgtcccaaaaagtgcttaaattgttacttttggttt

SEQ ID NO: 352 - DNA, 359 bp, Gossypium hirsutum
  Clone ID: LIB3493-027-P1-M1-A6
gggaaacaagataaaaagtattttgctttgcctaattgtaagctttgaggttaagtgaaaaactatggctgaagagggacaagtaattgcctgccacactgttgagtcatggcagcagcagctccagatgggaaacgagtccaacaaactggtggtggtggatttcacagcatcatggtgcgggccatgccgttttatatcaccaatcctagtggatcttgctaagaagctgcccagcgtcatattcttgaaggtggacgtggatgaactgaaatctgtcgctcagtcgtgggctattgaggcgatgccaacttttgtgtttctgaaaggaggcaccttaattgacaagcttgtgggtg

SEQ ID NO: 353 - DNA, 142 bp, Gossypium hirsutum
  unsure (1)..(142): unsure at all n locations; Clone ID: LIB3493-027-P1-M1-A7
ctatgttttcaantaaagcaagcttcataatagaacagcggctgacatnnanncactcagtctccacttatgggaatatttgagaagcgttctgcacggaatttggggggggaaccataaattttttttttttaaaatcccc

SEQ ID NO: 354 - DNA, 170 bp, Gossypium hirsutum
  unsure (1)..(170): unsure at all n locations; Clone ID: LIB3493-027-P1-M1-A8
gctttgtaatagtttcgttagttattaatacaaaaacagagagagacctaagggtccccgatggagaccggaccaaccggcggtgcccttggtggcgactatctgtggggggcgtctccctttttttttttatcgcggnggaaaaataaccctttttttttctttccttc

SEQ ID NO: 355 - DNA, 198 bp, Gossypium hirsutum
  unsure (1)..(198): unsure at all n locations; Clone ID: LIB3493-027-P1-M1-A9
ggggcatgaaccgtgaccttgtattgcgttttataggatgggcagactanncttatcactcantctgccctcactatgcggagtttgtttggagagagcttctgaagaaggagggctttgtttttttttcttgctggccatcaaaaaaatctccatatcttaaactcaagagtgccaataagtattttcaagatttca

SEQ ID NO: 356 - DNA, 366 bp, Gossypium hirsutum
  unsure (1)..(366): unsure at all n locations; Clone ID: LIB3493-027-P1-M1-B1
gtagatatgagatgttgggtgntgganccaattttaaaaacgggtggctacaccaaangtnatgtcttnntgcttaaatcattggcacttttgttcttgtctacacttggggggggtgctactgatttttttttaaatgccagagactaaaccttcctattttggcttccctacctattaggtttgcagtttttttattttatttgtttatttttcctattattttaactttatttatacttactattttttttttgattgtttgtttgtgtttatcatatattctttttttttttattttttatatttcttttcttataatcttttattatattctttctttttctatttttcttatttttatat

SEQ ID NO: 357 - DNA, 320 bp, Gossypium hirsutum
  Clone ID: LIB3493-027-P1-M1-B10
ctccaaaaatggacctttcttgcttccgcttgctttgtgtcctctctcttttggtacccatctctctttctctcatgtcctcgctgattcccacttcgaaggatttgacgccgaagaggatgaccctgttgaagatgacatcttacatcaccattccatcccatcgcctcctgtaactcagtccgattcacagcccctttcagatcttgaaaccaaatcccatcctgatccgaatcctgtccccacttcggattctccggcccagtcggatcttcaaaagccctccactacttctttcgactactgggatgaggaccagt

SEQ ID NO: 358 - DNA, 200 bp, Gossypium hirsutum
  Clone ID: LIB3493-027-P1-M1-B11
agaaaatctctgctaacagtagatggctatgatgaaaacacatctccctccttctaaactagcatttaaacatacaaatacaaaagtatcaacacctaacactatccactggcaactcaatcacattttcttctaataaatccaacatccaaatgatgattgccaacaaattccatctccataccaaaaactgtgacttt

SEQ ID NO: 359 - DNA, 378 bp, Gossypium hirsutum
  Clone ID: LIB3493-027-P1-M1-B12
gctatatatagcaactttggtcggggggaagcatatgttggcttatggaccaggtatgtgcaaggagatatctcattggtacttcaaccctcaaggtcatgctctatggcatgtcttcatgagcttcaattcatatttcgccaacacgttcctgatgttttgtcgtgctgagcagcgaagatgggatccaaaaatcgtccacttctttggtgttttcccttatgtcaagattcaaaagccaaagagccagtgaaaaaaggcatgcttgcttcacaaggcaattcttttttacccagaaaagatgaaatgaaagaaggttgtttggcccatattttaaaattcatattagcttcaaaacccccatcactttaaatcttg

SEQ ID NO: 360 - DNA, 209 bp, Gossypium hirsutum
  unsure (1)..(209): unsure at all n locations; Clone ID: LIB3493-027-P1-M1-B3
tcaaaaacactaagctttancttctgcatcttattaaatagtgaggggaccccaannannancnntcanactctatntaanangaaccatcttgggttacaagaagtcaaagtcgggccagtatcctttttctttattgatccagattaacaaacttaacacctatgatgaattatctttctattcttccaatcgttttccttatatct

SEQ ID NO: 361 - DNA, 361 bp, Gossypium hirsutum
  Clone ID: LIB3493-027-P1-M1-B5
atcaatttgaagccttcttcgaatgtcctcattcaagatgcaagattttcgtcaagacctcaccggaaagaccatcacattggaggtggagagttctgatactattgacaatgtaaaggccaagattcatgacaaggaaggcatccccccagaccagcaaaggttgatcttcgctggtaagcaacttgaggatggccgcacgttggctgattacaacatccagaaggagtccacactccacttagtgcttcgcctccgtggaggaatgcaaatttttgttaagactttgactgggaagaccattacattggaggtagagagttcagataccattgataatgttaaggcaaaaattcaggac

SEQ ID NO: 362 - DNA, 369 bp, Gossypium hirsutum
  Clone ID: LIB3493-027-P1-M1-B6
ctcttccttttcccctcgctctctgttccttgccaccaaaaaacatctttctgttcaatcaatcctcctttttctattcaaccataatgtcttgcttcattagcaaatacgccgatgagttggctaaaaacgctgcttacattggcacccctggaaagggtatccttgctgctgatgaatccaccggcaccatcggcaagcgtctttcaagcattaatgtagaaaatattgaagaaaacaggcgtgctctccgtgagctcctcttcactgctccaagagctcttcagtacctcagtggtgttattctcttcgaagaaaccctttatcaaaaaaccgcttctggcaaacccttcgttgatgttttgaaag

SEQ ID NO: 363 - DNA, 353 bp, Gossypium hirsutum
  unsure (1)..(353): unsure at all n locations; Clone ID: LIB3493-027-P1-M1-B7
cggtgctttgagaagaaaggccgctatactgtgcggaaagaagtggccctcangatgcacgtaagaagggtcaattcacatcatccaaggcaatttctgaagaagtagcctcagcctcttcaggatggagtggaacaccaggttctgggcaagatgagaatattcaagaagttttatgtacacactgtggaatcagctctaagaaaactcctatgatgcgtcgtggacctgctggtccaaggactctttgcaatgcatgtggactcaagtgggcaaataagggtgttttgagagacctttcaaaggtttctacagtagcaatcccggatccaactgtaaagactgctgagcat

SEQ ID NO: 364 - DNA, 180 bp, Gossypium hirsutum
  unsure (1)..(180): unsure at all n locations; Clone ID: LIB3493-027-P1-M1-B8
cgcgcttcnnaaaggcgnatgaaattttttataaaaagaggaaactcttanntcatcctacccaanctttaaangtctnaangangatanncntaattcttaagagaggggcttaagactttttttattatnaatgattcctaaaaaaactttcaattttaatatttttacttctttttt

SEQ ID NO: 365 - DNA, 357 bp, Gossypium hirsutum
  unsure (1)..(357): unsure at all n locations; Clone ID: LIB3493-027-P1-M1-C1
ttatctctaaaaaaacatctcgagctggaatttttaaaactagaggcaagctcttnttcaacatatttaatactaaaacaaccttcaactacactttatgacatgcaagcatggataatagcacattttttttcacttcccaaaaaacactaaaatctatggatcaatttgattatacaatgatttaactcactgttttttttcatattataaaattatcttctttttttgatactcttaatattttataatttccttaaatttttttattatttttctttttattcttatttttattattctttatatttcttttatattatatatttcttttattactatcttttcttctattct

SEQ ID NO: 366 - DNA, 352 bp, Gossypium hirsutum
  unsure (1)..(352): unsure at all n locations; Clone ID: LIB3493-027-P1-M1-C10
caaactcntnnncttncncaagaatttttttataaaatgtggggtccccctccntccccccttttttttttcctctttattttttttaatatttctttttttttttttattttttttgatgtttttatcccattttttttttttttttttcnctctaaaaaaaaaacacatttttattttttttttcttttcttattctatatattttattatctattttcttttattttattcttttctttatttttttttttatttttctctatattttatatttctatttttttttattattttattctattttttctatattatacttttatcttttttctattatttttttttttat

SEQ ID NO: 367 - DNA, 176 bp, Gossypium hirsutum
  unsure (1)..(176): unsure at all n locations; Clone ID: LIB3493-027-P1-M1-C11
gaagattatagattttttcctgatctcatcactaatgtgggcaatctctannncnaatctattgcatcanttttcttcatcnacagttctactcatcaattccttcgcgctccatcctctaactttttctctcantcagagccaaaaacgtcacctgaatttttttctacttcttc

SEQ ID NO: 368 - DNA, 122 bp, Gossypium hirsutum
  Clone ID: LIB3493-027-P1-M1-C12
cctcccggtttttgaggtctatttattagacttcttaaatatacagctttcaatgttctttacccattgaaaaaatattttcgctagattctttaatccattaaaatatcatgggcaagggt

SEQ ID NO: 369 - DNA, 103 bp, Gossypium hirsutum
  unsure (1)..(103): unsure at all n locations; Clone ID: LIB3493-027-P1-M1-C2
tctgaggttagaatgatcaatgatagttttcctctagcacaatgtgctgttgcttttnangaccttcttnnacanatccanattccattgctctcatngttat

SEQ ID NO: 370 - DNA, 353 bp, Gossypium hirsutum
  unsure (1)..(353): unsure at all n locations; Clone ID: LIB3493-027-P1-M1-C3
tcctcctatnacattgtnantnaacctccgttcgtatttcacaaatgtcagatccctcnaaaaatcctcccatccaatcaccacccgaaaccatggccactccttccccactcgaagaaaatgtctacaagttctaactctccgagcaagccaaacactacgaggagatggtcaagttcatggagaacgtcgtctccgccgtccccgctgccgacgaactctccgtcgaggaacgcaaccttctctctgtcgcctacaagaacgtcatcggcgcccgccttgcttcctggaggatcttctcctccatctagcagaaggaggaatgccttttcaactccttccacttcttcttc

SEQ ID NO: 371 - DNA, 89 bp, Gossypium hirsutum
  unsure (1)..(89): unsure at all n locations; Clone ID: LIB3493-027-P1-M1-C4
tcttcctctttaccctccatctctctctccagaccttttttatatattgtgaccccccccttctnnnatcttttancttattcttcttt

SEQ ID NO: 372 - DNA, 350 bp, Gossypium hirsutum
  unsure (1)..(350): unsure at all n locations; Clone ID: LIB3493-027-P1-M1-C5
cttttacatacaagcatttaattcagaaggaaaactaatcggggctcttccttcnaggttctctgtcaaaggaaaatcgaactgtttttctttctctttcaatcagcgacagagaaactccattcctctcatctattactctaatagccactcaggatggcttcaatcctgcagccatcgaacgctacctttcttccgtcattcaccaaaatacgtgtcacactttacactccaaaatctccatccattgaagacatacccggtgcgccttaaacctagaatgtccagtcctagatcaaggctcttcgtgatctagctcgacattcattaccactacatctctaaatgct

SEQ ID NO: 373 - DNA, 131 bp, Gossypium hirsutum
  unsure (1)..(131): unsure at all n locations; Clone ID: LIB3493-027-P1-M1-C7
ctcgaagcttccttttccnttgtatatctcaaaatgggggaagctctctttttcatctatnnctnctactatcntctccntcaaagctangcatatcttctacagccggggaaatccaacttttttttttt

SEQ ID NO: 374 - DNA, 273 bp, Gossypium hirsutum
  unsure (1)..(273): unsure at all n locations; Clone ID: LIB3493-027-P1-M1-D1
ccaccaacctctgttttctggtgtcgatttccaccacctaatggacctaccacaaggaaccgcgaaccagtcctttttacttttttttttttaattattcacatatacatatgctttgtcttttttcaatattcgcagngattcattgtttcaaagcttcaaacttttgcattctttagtgtttctatttctttggaaaaggtctttctgtgtatcatcaatggaagctaatttgttcatagcttctttttttccatcttaggttgtttctaa

SEQ ID NO: 375 - DNA, 165 bp, Gossypium hirsutum
  unsure (1)..(165): unsure at all n locations; Clone ID: LIB3493-027-P1-M1-D10
taaaaatcaaaaagccggaacgtctgatttcactacgggtgactgctattgcttcgctttggcgcanttcaccanggtttcttttgaaccctcccccttcaaaaaagggggggcacacatatttttttttttttgtacttggttaaactaaactcactagttttt

SEQ ID NO: 376 - DNA, 374 bp, Gossypium hirsutum
  Clone ID: LIB3493-027-P1-M1-D11
aacacagataagcaggtccgtggggaaagagagacagagagctgctgagaatagcaggagtaccttgcagcgaaggaggaagcagatactcaagaaggtcgggcaaaccagcttgaggaagaaattagggaactaagacggaaacataagcaagagttacaagatgcttatgtgcagcaggaacgcctacagcaggaagtagaaagggagaaagctgctcggttagacttggaaaggacaatgcatgtgcattctatggctatatctgagcaagctccaatggcaaggcacaattctgcttcggagaatggaagcttgtcccggaaactctctactgctagcagcctaggaagtatggaggaaagctattatct

SEQ ID NO: 377 - DNA, 331 bp, Gossypium hirsutum
  Clone ID: LIB3493-027-P1-M1-D12
gggttttcattgatttttggtgagaaaattataaaaaaaattatgggaagaggtgggttgaacttaagaggattgaaaacaagatcaacaggcaagtcacttttgcaaagagaagaaatggtcttttgaagaaagcttatgagctttccgttctttgtgatgctgaagttgctctcatcatcttctccaatagaggaaagttgtacgaattttgcagcagctcaagcatgatcaaaacattggagaggtaccaaaaatgcaactatggagctcctgagccaaatttgtcatcgagggaggctgctttggaattaagcagtcggcaggaata

SEQ ID NO: 378 - DNA, 233 bp, Gossypium hirsutum
  unsure (1)..(233): unsure at all n locations; Clone ID: LIB3493-027-P1-M1-D2
aaaaaagctgccatggaatgngatgtnatgcaccttggtgacgagtggcatctccnangagccatggatcgtgttaggaaagttgggcagaaattctttgaactccctggggaggagaaagagatttttttttacnaccatagctaataaaatgttcagggctattgtagcaatctttctaataatgcttattttcatcntnagtggtatgactacttttttcatctaatttt

SEQ ID NO: 379 - DNA, 233 bp, Gossypium hirsutum
  unsure (1)..(233): unsure at all n locations; Clone ID: LIB3493-027-P1-M1-D3
tcaaacctgttttgatcaaagaaaagtttattttataaaaagtgcccataaatanaattncnttnnnncaccnnnatangccanccatccnactgttataaaaccttctggggctgaattcttttttttttttatttttntatttaccaaacaaaattcccttcttttttatcactcaatctatctttccttattatttatatttcacactctatctctttcttctttatatc

SEQ ID NO: 380 - DNA, 340 bp, Gossypium hirsutum
  unsure (1)..(340): unsure at all n locations; Clone ID: LIB3493-027-P1-M1-D4
gctgatagagaactcgaccaacnagcaagtcacgtattcggagagaagaaaccgtctttcaagaaagctaatgaacttacagttctttgcgatgctagagtttcgatcatcatgttttccactactggtaaactccatgagtttatcagcccttccaccacaacgaagcaagtaattgatcagtaccagaaaaccttggggatcgatatctggaacacccactatgagaaaatgcaagagcagttgaagcagctgaaagaggttaacaggaacctgctcaaagagattaggagaaggatgggcgactgtttgaatgatttttgcattgaagatctttgtg

SEQ ID NO: 381 - DNA, 236 bp, Gossypium hirsutum
  unsure (1)..(236): unsure at all n locations; Clone ID: LIB3493-027-P1-M1-D5
aaccactctcatgggaagaggataggctgcaaacactagcgcagaggaccaanccatggtcantttttgtccagcctggtggctaagaaatctgtggtgcctatagcttcaggcaggcagattgtgcttttcccaacttacattgtgaaggccaatattggaaccccatctcagcccatgcttattgccatggatacaagcagtgatgctgcttgggtgcctttcacttgctgcat

SEQ ID NO: 382 - DNA, 350 bp, Gossypium hirsutum
  Clone ID: LIB3493-027-P1-M1-D6
cccaaattaaaaagatcgaacctcttcattcattttagctaaaagctttgggagttcatcagcaggattaggcagcatgtcggtgaaaacacaccggtggatcaatcctcaccaaattctatcatcactaaccattttctttgtcatcaccatctttgtatatcccatcaacagcttggaatcaaggaggctcgatgacagcactgttccaggtgatcaatgcattaaacgtaccccatcatgtatacaaagtccttcaccaccctcactgccgccaccatgccctccaccaccattacccccagcactgtctacacctagaccgaaaaagctgtcaacccaatactgtt

SEQ ID NO: 383 - DNA, 186 bp, Gossypium hirsutum
  unsure (1)..(186): unsure at all n locations; Clone ID: LIB3493-027-P1-M1-D7
ccgtgactaacnatnagatagcttctgatttaaaggagcgtgtcatcaanccggttaacccnanaagtaccttgatgagaaaaccattttccaccttaacccgtcagggggtttcgtcattttattttcccatggtgatacaaaaataactgttttcaagattattattgtttcttattgatgatt

SEQ ID NO: 384 - DNA, 272 bp, Gossypium hirsutum
  unsure (1)..(272): unsure at all n locations; Clone ID: LIB3493-027-P1-M1-D8
ggaatcannnttcctctnctgtttttttttatcatagcgtgactcccctctcttcttttnnnctttctntatttcaattataaattcttcttctcttattttccttgtggcgtcacatctttttttttttttttcctcctcaaaataaaatacatttttttttttttttttttctttttcttttcttctttttctcttctttctttcttcctttcctcacttttttatcttatttacttttcttttttctttcttttttatcttttttattt

SEQ ID NO: 385 - DNA, 153 bp, Gossypium hirsutum
  unsure (1)..(153): unsure at all n locations; Clone ID: LIB3493-027-P1-M1-D9
attttctctcatttttttttgccttcttccacaaagttggcacacattcattnaaaatcttataaaaataattccacttttctttcaattataatttttttcttgtgcgggtccccacttttttttttctctctttccaaaaaacaaccctct

SEQ ID NO: 386 - DNA, 238 bp, Gossypium hirsutum
  Clone ID: LIB3493-027-P1-M1-E1
cggacgcgtgggggtttaccaggagtcatctccggtgacgagcttctttctgactcattccctacaaggaaatcgagaatgggatgctgtgggaagttgagggaaagtgggttgtgcaaggagctttctatgttgacattggtgccaatccttcagccgaaggtgctgatgaggatgaaagtggttattaccaaactgttgaatgtttgttgacattttttcacactttcaatgcttt

SEQ ID NO: 387 - DNA, 341 bp, Gossypium hirsutum
  unsure (1)..(341): unsure at all n locations; Clone ID: LIB3493-027-P1-M1-E11
ctttgcccaggatatatgactgaangttgctttaagaagagctattctntactcttcttcctcgactaaataaacaagatgcagaacttctgtctacttcccaaatggttgaagcaagagcaatgttaatgcaagggatacagaaccgatctaaggctaagatggaagatcattctgaaagtggcacttcaaatataaaggctgatttaccacatgaagagtttctttctgtgccttctcccgctcaatctaagccaacaccatttaatgaatcttgaaatgaagcatcctatactgctgtaactgtttaagtttcaacacataatcacccacttcatact

SEQ ID NO: 388 - DNA, 140 bp, Gossypium hirsutum
  unsure (1)..(140): unsure at all n locations; Clone ID: LIB3493-027-P1-M1-E12
tggcgcttaagcgcgcgaccgtacccggccgtcggggcgggggccaggccccatgagtaggagggcgcggcggtcnccncaaaacccggggcgcgagccctggcggagcggccgtcggttctttttttgttggttgttgc

SEQ ID NO: 389 - DNA, 381 bp, Gossypium hirsutum
  Clone ID: LIB3493-027-P1-M1-F1
ggcgaagcaaaaacttggagcggaggaggaaagcaagtagtttgaaaagccatctctctctatacacattctatctctagtatggcgccaattcggatgatagatatcgccgtcaacttcacagatggcatgtttaaaggcatttataacggcaagcaacatcacgtttctgatattgctactgttctgagtcgagcttggaacgctggcgtcgatcgaattatcgttaccggtggttcccttgaggagtcaaaagaagctcttgctattgcagaaactgatgggaggcttttctgcacagttggagtgcacccaactagatgcaaggagtttgaagagagtggggatcctgaaaaacattttcaaggacttttggcattg

SEQ ID NO: 390 - DNA, 368 bp, Gossypium hirsutum
  Clone ID: LIB3493-027-P1-M1-F10
gcgtcttgtcccctatgtgagagcgaaattagtgagagcagcagtggttcaccatagcccaagattcgcattaacagtgcaggcaagacaatcgtcaatggacgaatgatcggtaatgtcttcaatgttttacgttgttctactggttcttgcatttaagtttgagtcgagttaagtcaagtcgtcacgagtcccccatgcaagagatacaaatatatagttaggctatcatcaaaaaagaaacttggaatgctatatactaaaaaagattgtttcttgaggctaacctcacatgttcatacaaaaattattttggttgctattgttcttttttaccatgtaatgtgtaaacatgactgtcttgaatt

SEQ ID NO: 391 - DNA, 336 bp, Gossypium hirsutum
  Clone ID: LIB3493-027-P1-M1-F11
tgatgctctccccttgcaaagcaagggcgagcactgtgcggcctctttctgctgttctgctttcgcattcggttcttgcaaagaaggctggtactaccgctgccttggccttgacccataaacaaccccacctcaatacctctattcctttccaccaataacccagatttgttttttttttgttatacgccccacaaaataacaaaacaaacccattgtttctcttttcgcggttgttggtgaattgttcattcatctgtgtttggttttgattccttttcattttgaattttgaacataaaaaatttgaaagaatgttgctctacatgcagaaga

SEQ ID NO: 392 - DNA, 366 bp, Gossypium hirsutum
  unsure (1)..(366): unsure at all n locations; Clone ID: LIB3493-027-P1-M1-F12
ttttcgtctccatttttgctagtngaattcttgagcttagatggagtggtgtcatatcgaagactggtggagaaacgaacagttctgggtcattggtgggacatcagctcatctctttgctgtttttcagggtcttctgaaagtgcttgctggaatagataccaacttcactgtcacttcaaaggcatctgatgatgatggcgagtttgccgagctttatgttttcaaatggacatcacttctcattcctccaaccacagtactcattatcaacctggtgggcattgtggccggcgtgtcgtatgctataaacagtggttaccaatcctggggtcctcttttttgcaagcttttctttgccatctg

SEQ ID NO: 393 - DNA, 134 bp, Gossypium hirsutum
  unsure (1)..(134): unsure at all n locations; Clone ID: LIB3493-027-P1-M1-F2
atcgcgagggccgcccttttttttgttngttttactaaagcttagatttattgtnttggttttattatnttattnataaaagaaacaattattnataattttttactggtgttggaatattattcatttttatt

SEQ ID NO: 394 - DNA, 253 bp, Gossypium hirsutum
  unsure (1)..(253): unsure at all n locations; Clone ID: LIB3493-027-P1-M1-F3
tgatggcctcactcnccaacacaacgtcagtttccaataacggcgccctnaaaatttccaattaaaacttattcccatcatttcttccaaatccctctcctttccctctttcaggccttccattttctttcttaaacccttaatcccaaccaaattctcctctatttcccctctccaattcttctctaatcctttcccttctacctttccttcttcccttttattttcttttttcttatcttttattcttttt

SEQ ID NO: 395 - DNA, 122 bp, Gossypium hirsutum
  unsure (1)..(122): unsure at all n locations; Clone ID: LIB3493-027-P1-M1-F4
ccctgactggtttttaaatagnctagactattacaaggacgggaggtattcccaagtgtgtctaatgctcttgacatgaagttgagggatgatttggagcgtttgaagaagaggaggaacca

SEQ ID NO: 396 - DNA, 353 bp, Gossypium hirsutum
  unsure (1)..(353): unsure at all n locations; Clone ID: LIB3493-027-P1-M1-F5
atcaaatcaaaacagaacttgcaagcctttcatacaagactagtgattcntgttcaaaaaccaaacaagccaagtacatggttgatttggacgttcagatccctacaactttggatccattcgccttattctttgaattttatggcaatgaaaccaactagtttgttcttattctttttctttaattgtttcgttttaatattttcttttcttgttttgtttttatttatattctcttttttctattaatttcttttttggtttgagtgttttttttttttcctttttacttctttcttttttattttttcttttttttttttttttacatctttttcctctttttttttttt

SEQ ID NO: 397 - DNA, 224 bp, Gossypium hirsutum
  unsure (1)..(224): unsure at all n locations; Clone ID: LIB3493-027-P1-M1-F6
cggacgcgtgggcgggaaagaaccgcatattgtacataggcattttgnnannaccctnatagtgggccttacacacttaagtatcgcggcagcatgtggggatataaacgattgttcaaaataacttttttgtagcagtcttactaccaaaaatactattgcctctcggcacttctttttctttaaaatcttttttcatttactatttattctctttttttttt

SEQ ID NO: 398 - DNA, 360 bp, Gossypium hirsutum
  Clone ID: LIB3493-027-P1-M1-F7
cggacgcgtggggttgcttgccgtgttgttggtgatgctttcggagccacaacacacctgatcttgttgttcgagcaaagacaatgagggttgatgtcaatgtagtacataatgcatccgtgatgaatgcaatcggaatttgtggattgcagctatatcgttatggggagacagtttcaataccattctttactgaaatatggaggcctgatagcttttacgagaaaattgaaagaaaccgcaatcttggattgcacacactctgccttttagatattcgtgtaaaggaaccaacattggaatcattgtgcatgggaagaaagcattatgaaccaccaatgttcatgacgataaacactg

SEQ ID NO: 399 - DNA, 199 bp, Gossypium hirsutum
  unsure (1)..(199): unsure at all n locations; Clone ID: LIB3493-027-P1-M1-F8
cgaataacatctggaccgccaganaagctaaccatgctgaacaaagccacaacggcattcaaccttcgatgatcattcaatcctccactctaatctctcagttgataccgcccttccttttctttttatggtccctcgcgttatcaacttgatcatagatctttttatgaaatttttttttttttacttttcttttttt

SEQ ID NO: 400 - DNA, 220 bp, Gossypium hirsutum
  Clone ID: LIB3493-027-P1-M1-F9
ggcggttttcgtagacaagaacgctcgtgtcatttgccaagggatcactggaaagaaggcactttccacactgaacaagccatagaatatggcactaagatggttggtggagtaacacccaataatggtggcacagagcacttagggcttcctgttttcaactctgctgctgaagcaaaggctgaaaccaaggctaatgcttttgtcatttattttcctc

SEQ ID NO: 401 - DNA, 399 bp, Gossypium hirsutum
  unsure (1)..(399): unsure at all n locations; Clone ID: LIB3493-027-P1-M1-G1
attcccctgctttaattattttgctganaacctaaaaacaatggcgtcttcctcntacacaaatactaaatcagaaagctagatccaaaccctaaaaccacctctttgttagtgatccacattcatatctttttttccttcattgccaaacctattcttaatatctctatttccaccatcaaccttttcctataatctttcttccctattttcttcactccttcctttcttttattctttccctactatcttatattctttttttattcttttctcaattatattttctatttattctttattctttcttttctacttcttttccctctctctctcttccttttattctattttttcctctttttttttctattccttttatttctttttcattttttc

SEQ ID NO: 402 - DNA, 186 bp, Gossypium hirsutum
  unsure (1)..(186): unsure at all n locations; Clone ID: LIB3493-027-P1-M1-G10
gaacaggtaaaaaactaattagtttttttttataaagggggaaatcaaanaccacccattaangtaaattcatattattgttgactattaattatattaactatttatgggacaataaaatttttttttttcttttatcataaaaaaaatcttatcttatattttttttctcttatttactttttt

SEQ ID NO: 403 - DNA, 372 bp, Gossypium hirsutum
  Clone ID: LIB3493-027-P1-M1-G11
agatctttggtccattgcgtcgataatcacgttggataagattgaagacagtattattttatcaattcaaggcctaaaccattagcactatatgctttcaccaaaaatgaggtgttgaaggagagattggtatctgaaacatcatctggaagtgtggtttttaatgatgcaatcattcagttcgcagctgacacccttccatttgggggcattggtgaaagtgggataggaaaataccatgggaaattctcctttgacacatttacacactacaaggcagtggccagaagaagcttactcactgatttttggtataggttccctccatggaacaattacaaactggaactccttgagaatacttacaattac

SEQ ID NO: 404 - DNA, 241 bp, Gossypium hirsutum
  Clone ID: LIB3493-027-P1-M1-G12
gcaacacatgatctaaaggggaggttttcaacaatgaccgatcctggtccaattgggatgctgaaccaaagtgggacactgaggctaattgggatgtggaaaatccaatcgagttaccaaggccatcaaatgatgttgattcaggaataaataaggaagttgtcccaagacttgaagataaatgggttttgaccaaggggccatttcttggcatcattgtgtgcaaccaatcatgcagaac

SEQ ID NO: 405 - DNA, 217 bp, Gossypium hirsutum
  unsure (1)..(217): unsure at all n locations; Clone ID: LIB3493-027-P1-M1-G2
cttcttcctcttccctcanaattttgttctcttttcccatagcaaaacaaaagccatgttcagactgttgtgctcaaggttggcatgtcatgccaaggatgtgttggagccgggaagagagttctgtttttaatggaaggtgtgtaataatattatgtatattttttactatcttatgttgacttgttattttattttttttttatatattcttttt

SEQ ID NO: 406 - DNA, 120 bp, Gossypium hirsutum
  unsure (1)..(120): unsure at all n locations; Clone ID: LIB3493-027-P1-M1-G4
tcgtgagaattggttaacctaacaggggcggggttttttaaagggggggggccttctccttttttntactanttcttttttttatattttttttaatttttttttggggggttttttttt

SEQ ID NO: 407 - DNA, 169 bp, Gossypium hirsutum
  Clone ID: LIB3493-027-P1-M1-G7
attttcccgcattttcttgatgcttgtttaactagggggggggctcttaacatttttttaattttatatttttatctgatttttttttttttgggggtttttgttttttttttttttggaattattgttttttttgtttttttttttttttttgttttttttttttttt

SEQ ID NO: 408 - DNA, 219 bp, Gossypium hirsutum
  unsure (1)..(219): unsure at all n locations; Clone ID: LIB3493-027-P1-M1-G8
tcttcctgcctcctgttatcaacagacctgcttatttatctacagagagtcccctcaccntacaccnattcatcaattactatatccaacncatcaatgcattaaaccttaatttaactcacaaacaatctctttattttatcttcctcataattaaaacttttctttactacttttttctattttctatcttctatttttctttctttatatcttatt

SEQ ID NO: 409 - DNA, 101 bp, Gossypium hirsutum
  Clone ID: LIB3493-027-P1-M1-G9
cttcatcaggaagcactgagatgatactttataaacattaggggtaaatcccacacatttccaagttttatatccactgcttgcattctcatacaacttga

SEQ ID NO: 410 - DNA, 230 bp, Gossypium hirsutum
  unsure (1)..(230): unsure at all n locations; Clone ID: LIB3493-027-P1-M1-H10
cccatctctcctctcatacttgactctaacgttacctttgaggttttaggaaacagcanagaaattaaggaatggagaccttcctatttacctcggagtctgtgaacgagggacatcccgacaagctgtgtgatcagatctctgatgcagtcctcgatgcctgtttggcacaggatcctgagagcaaggtggcttgcgagacctttagcaagacaaacatggtgatggtt

SEQ ID NO: 411 - DNA, 235 bp, Gossypium hirsutum
  unsure (1)..(235): unsure at all n locations; Clone ID: LIB3493-027-P1-M1-H11
tcttccacttttgttactttntgacaagtnttttttaactaaactttgtctctctatgcaaaaaaaaaaaaggaaaaaaaagtttctcttctttgctttctttcaagtaaaaatcaaacgaaaaacaacttaaataatattaaaagatattgattttcatcatcaaattttctgtttctgatccaccaatccattcttaatctttaattcttaaaactttctttttttattttat

SEQ ID NO: 412 - DNA, 336 bp, Gossypium hirsutum
  Clone ID: LIB3493-027-P1-M1-H12
tgacagcactatgcttggggagggtcacttccaactcaacagctgacctctctttctccatttgatgtgagaaggatctttctttctttattctgcacatcttaaccttaaccacatcataagatagagatctcttaaacgatcgagttatggagactgtcttttcagcagcaagtagatccatttccaagctcattagcttcaccgctttgcttcttttcttgttttcctgctctactttcacttctactgaagcttatgatgcgcttgatccaactggcaatatcactattaaaagggacgttatatgttggaccccaaattgctttgttgctg

SEQ ID NO: 413 - DNA, 221 bp, Gossypium hirsutum
  Clone ID: LIB3493-027-P1-M1-H2
ctccctctttaatttgttttcttttgctttcttttacatatctttatatctctttcatttttcttttgctcgtttcgttgcatattttttttacaggttgtttattgtagaaaggatggctgattttctctaacatccttctgtcatactaaagattgcttgtctactccatcttggtttcttcctttcttaacatcttctatttctttatttatttattt

SEQ ID NO: 414 - DNA, 241 bp, Gossypium hirsutum
  Clone ID: LIB3493-027-P1-M1-H3
cccacgcgtccgggaaaaaggaacgatctttacaaaccaaagacaaaaagcaaaaatcaatttgttaacagtgtttatgagattgaaagatgaacaaggaaagccattttgcgacaagttcctgctttttttttattttaactctatactaaccggaatatatacatcttcattttcttttatctatatttttctattttatttaatttttatctctctatttttttctttataatatttt

SEQ ID NO: 415 - DNA, 51 bp, Gossypium hirsutum
  unsure (1)..(51): unsure at all n locations; Clone ID: LIB3493-027-P1-M1-H4
cgcaagatcggcaatagtanggggtggggttcatatagaggggggggatta

SEQ ID NO: 416 - DNA, 185 bp, Gossypium hirsutum
  unsure (1)..(185): unsure at all n locations; Clone ID: LIB3493-027-P1-M1-H5
caaaatacttcatctgcaatttctggtttagtcattgcttttggtgcatgttggcantnncatttattgtcctagtactactcccgcttattgcaatcaacggatatattcaagtaaaattcatgaaatgatttagtgcagatgtaaagacaatgtatgatgacgcaagccaacgtgctaatgat

SEQ ID NO: 417 - DNA, 254 bp, Gossypium hirsutum
  unsure (1)..(254): unsure at all n locations; Clone ID: LIB3493-027-P1-M1-H6
caaacttctaaacatgcttcgacagtanttgattcaagtgcttcggaaaattcatttaattcttttgggtccaaacataaaatgatttacggtaaatatctcatcatactcgggttaaaacaatcaattcgtccaaacacaacaggtcaaaaatagtgtacaatgtatgtatatattttaataattcattacaatcctttatatttctctgtctctcaaaaatttatctcatttacagtttatcttctaatctt

SEQ ID NO: 418 - DNA, 56 bp, Gossypium hirsutum
  Clone ID: LIB3493-027-P1-M1-H7
ggcacgtgagggtcatagcgcagctcttgttaataaacgactcttcatatttgttg

SEQ ID NO: 419 - DNA, 177 bp, Gossypium hirsutum
  unsure (1)..(177): unsure at all n locations; Clone ID: LIB3493-027-P1-M1-H8
cgatcaagttcccattatgnaagtcgttttttaaaacgcagctaattccnactatccancacatacccttacttctattctcatatcacaaatacttagcacattaccgagttcaaaaaaaaattttttctcattttctaaaaatcaatcatcaataacctatacatgttccttaca

SEQ ID NO: 420 - DNA, 371 bp, Gossypium hirsutum
  Clone ID: LIB3493-029-P1-M1-A1
cggacgcgtgggctttttttcgttttggctctagtttctttgattcttcttggaatttagagtgatggccggaaaaggagaaggaccggcgatcggtatagatctcggcacgacttactcttgcgttggagtatggcaacatgaccgagttgaaatcatcgccaacgaccaaggcaaccgtacgacgccgtcctacgttgctttcaccgattccgagcgtttaatcggtgatgccgctaagaaccaagtcgccatgaatccgatcaacaccgtcttcgatgctaagcgattaatcggcagaagatatagcgattcgtcggttcaaagcgatatgaagctttggccctttaaggtaatcgcctgtcctggtg

SEQ ID NO: 421 - DNA, 162 bp, Gossypium hirsutum
  Clone ID: LIB3493-029-P1-M1-A10
aaaaaaaaaaaagggaagaaaagagagaatgaagcaaggtctccaattccaaccatgcgtttgcccatgatcatattgctggtgttaacgatctggaaagcaggaaatggttcgagagcgaatgagttaaaggcggatgggaaagtgttggagttggatgaa

SEQ ID NO: 422 - DNA, 368 bp, Gossypium hirsutum
  Clone ID: LIB3493-029-P1-M1-A11
gccagattcgactctcggactgtgggcttcgtaccttcgctcactcgcccccaactcaggcgattcatttctatttcatgcaaggccgaaaataacccatctcacttctcttatcctctatccaatcccagcaatgaattgccttcactgggttctccgcgagtcgactcggcaaatgggtcaacacccacttccaattttctcaagctttttgcaattaaagcttctgcacaaagaaaggcaatcacagcagggacatatatagcactctctgccattatcatgttcttaatccaaccaatttttgtaccaacagcttttgcaacctttcaagctggtactaaagccagtggaactgcaactgctgc

SEQ ID NO: 423 - DNA, 377 bp, Gossypium hirsutum
  Clone ID: LIB3493-029-P1-M1-A12
aagctttgcagacacatataagatggattgcccagctgctataaaccgacttgtaacctctggggtgcctgctaccgttgagcaccgagctgcagccgccacatctgctactaactcggctgccattgtggctgaatgcgtgcagaattttatcactgccatggactcgttgaagctcaatatggtggcagttgatcaagtgcatcctctgttgtctgacctctccgcatctctcaataagcttggcattttgccacctgatttcgaggggaagatgaagatgaaggaatggatttcacggttgtcgaaaatgggcgcggctgacgagctaacggaacagcaagctaggcagctccactttgacttggaatcttcat

SEQ ID NO: 424 - DNA, 318 bp, Gossypium hirsutum
  unsure (1)..(318): unsure at all n locations; Clone ID: LIB3493-029-P1-M1-A3
tgcaatgaagtttttcctttctcgattggtctaattaaaggtcggggaaaccttttattacttcctttttatatggtcattcttgccctgctttttataatattacttatgtgagggaccttattttcatttttttagggtcacaactatttaccttttttgtcacattttgtgggcngtaatttcttcactttttttttttttattcttcttttctttttttttatttattcctttttctccttttctttcctttttctcttattctctttcctattgtgtttgtgttcttcttttactttttttttttctttttcc

SEQ ID NO: 425 - DNA, 311 bp, Gossypium hirsutum
  Clone ID: LIB3493-029-P1-M1-A4
ataagatggtgactctcatgggggaaggtaaagctacgactgctgatcttgtggaaattagattggatagtctcaagaatttcaacccttttgaagacctcaatgttttaatcaaacaaagccctttgcctacactcttcacttacagaccagtatgggaaggtggccagtatgatggtgatgagaaaaagagattagatgttcttcgattagccatggagttaggggctgattacattgatgttgagcttaaggttgctcatgaatgcattaaatccattggtggaatgaagccttgtaagatccaagtt

SEQ ID NO: 426 - DNA, 224 bp, Gossypium hirsutum
  Clone ID: LIB3493-029-P1-M1-A5
cggacgcgtgggcttttgcttgcagagttacatctctggttccgtgggtatggtaggagaaatggagagcgaaggaggaagtcagttcgcggatgcattgttagtcaagatctggcagttctgaacttgtttattgttaagaagggtgagaatgatctttctggattgaccgacactgataagccaagaatgaggggtccaaagagagcttcgaaaatcctgaa

SEQ ID NO: 427 - DNA, 236 bp, Gossypium hirsutum
  unsure (1)..(236): unsure at all n locations; Clone ID: LIB3493-029-P1-M1-A6
gtcttgacccatcacanacctgggtcggccaggatactcaagatgcccaccaagattaacaaaggtactgttgaaattatcactcccgttgagcttatcaagaagggtgacaaggggggttcttctgaggctgcacttcttgccaagctcggaattaggccattctcatacggtcttgntgtcttgtctgtttatgactatgggtcattctttagcccttaggtgcttgacctttc

SEQ ID NO: 428 - DNA, 355 bp, Gossypium hirsutum
  Clone ID: LIB3493-029-P1-M1-A7
cgacaccaaagaatttgacatggatgtcatcattgagacaaaccgcacaacagccaggattttccctgctgtgctggatgtggagaatccagagttcaagagaaggttggacaaaatggttgagatcaatgaacagttgcttgctgttggggagacctctgatattccattggtgaagaacttgaagaggattccattaattgcagcattggcttcagagctcctagctacgtatctgatgccgccgatcgaatctggatctgttgattttgctgaatttgaaccacaacttgtgtactagaatgtttttctttttgtaagatttccattttttgatgtggtatatttcaacttt

SEQ ID NO: 429 - DNA, 384 bp, Gossypium hirsutum
  Clone ID: LIB3493-029-P1-M1-A8
gtttattctggatttgggcttgtggaattgaatcaaagcttgcggatgatgtggggaatactgaaatggatcttttcttgattggtaagatggttaaggctagtgtttcttcctgtgggcaagtgcatttgaatgcagaacagatgatgaaagcgaagcgctttcaggaatttttctttaatggcttgtttggtaagttatttgttggatctaaatcatctggagcaccaagagaatttctacttcgggataaatcaagctcattgtggagtccatcccgcatgtatttgcttttgcccctcgaggataattcaactgatgaattgagaatacactggcccgggataacagcttgcacattagctgccgaatttttaaattaaa

SEQ ID NO: 430 - DNA, 222 bp, Gossypium hirsutum
  unsure (1)..(222): unsure at all n locations; Clone ID: LIB3493-029-P1-M1-A9
ccctcccggcatctaaaaaaacaggcaaggtttaaaatcactggaagcatgtcctgaaacaaaagctaagatgagtgaacttgaaaacgaactgttaaatatcgtgggcttagatgagcttaaagtacatctttttaaatgggcaaaggggatgctcttggatgaaagacccanatcgcttggatttaaagtttgtcctttaaaaccaccttatatttcttt

SEQ ID NO: 431 - DNA, 387 bp, Gossypium hirsutum
  Clone ID: LIB3493-029-P1-M1-B1
cggacgcgtgggcggacgcgtgggctgttaagccacatgaggcatttctcaagttgagacatgagagcaaggttgagcacatctttgtggttgggaactctggaaaacagtttgagatagttctaaattttcttgggctggttgagaagttcttctatctctcaggcaaatatgacatggagctcactgttggtgatgccgctatggagaactctttgttagtagctatcggacatattgagttagatctaccaaaagcacccgagaaggcaccccgccctcctcctcagcccatagatccatactcaagatatggacccaaagcagagataacacacatcttcagggcttctgaaaagcgttcacctcaagagcttttccttgctt

SEQ ID NO: 432 - DNA, 376 bp, Gossypium hirsutum
  Clone ID: LIB3493-029-P1-M1-B10
aaagacgatgcattcaagaactggtccaatgaatctactaagtgagaggacccttaagggtgctttttatggcaactataaaccacgcactgatattcccatggttgtcgacaaatatttgaacaaggagctggggctggatatggacaagttcatcacacactctgtgccttttgccgatattaacaaggcattcgactacatgctccagggtataggtctgagatgcatgattcatttggatgcttaaggaaatgttgctgctgtatatttgcccatccaaggatcaaaactctaatgttttgtcctactatgtgttatattatgtgcctacttaagctacctttcccggttatcaagagtgcctatatagaac

SEQ ID NO: 433 - DNA, 90 bp, Gossypium hirsutum
  Clone ID: LIB3493-029-P1-M1-B11
cggacgcgtgggtttcgtgtcggcaaatcagatagtttgggttctcttctcttatcagatttcacccaccaacgtgttcgatagtgtttt

SEQ ID NO: 434 - DNA, 374 bp, Gossypium hirsutum
  Clone ID: LIB3493-029-P1-M1-B12
gtatcgatgtgtttggtgcccaggttcaacattgtttccgctggtgctgatatggagatatacttcccttacaccgaagagaagcggaggttgaagcatttccatactgagatcgaagaccttctttacagcaaagttgagaatgaagaacacttatgtgtgctcaatgaccgcaacaagccaattctgttcacaatggcaaggcttgatcgtgtcaagaacttaaccggactcgtcgagtggtacggcaagaacgcaaagttgcgtgagttggctaacctcgtagttgtaggtggtgataggcgaaaggaatctaaagatttggaagagaaggccgaaatgaataaaatgtttgagctgatcgagaagtcaac

SEQ ID NO: 435 - DNA, 347 bp, Gossypium hirsutum
  unsure (1)..(347): unsure at all n locations; Clone ID: LIB3493-029-P1-M1-B2
attcccccccgcctccccccagtacgcactgctatctggctggccctctctctaatgacgcttagctcangaggatcgagtgtcgtggtgcctcggaacttccgattgctggaggagcttgagcgtggagaaaaaggtatcggagatggtactgtcagctacggaatggatgatggagatgatatttacatgcgctcttggaccggcaccattattggtcctctcaataccgtacatgaaggtcgaatctatcagctgaagctgttctgcgataaagattatccagagaagcctccaagcgtacgttttcattcaaggatcaacatgacttgcgttaaccatgaaac

SEQ ID NO: 436 - DNA, 265 bp, Gossypium hirsutum
  Clone ID: LIB3493-029-P1-M1-B3
aaagaagggaaagagtgggaatgaaagatacattgacaagaagagggcagctaagagaactgaatcgaccatccctattttcaatatggaagacattgaggagggtgtagaaggatatgaggaagaaagatctcttctcatgtctcagaagagactagagaagcgatttggtcaatccccggtatttatcgctgctaccttcatggaacaaggaggcattccaccatcaaccaattctgcaacgcttttaaaagaagcaatccat

SEQ ID NO: 437 - DNA, 385 bp, Gossypium hirsutum
  Clone ID: LIB3493-029-P1-M1-B4
gaataatacaattcagccagggggagaggtcacttacaatatagagttaggggatgaaataggaacactgaggtggcacgctaccagtgcttgggctgctgcaaccgtccacggtgcctttgtcattttgccagtagccaatgaagactatcctttccctgcacctacttctgatcaaacaattatacttggggaatggttcagggaagagttaacggaagctaatcaaaccattgctcctggctcagcagatgcttacactatcaatggtcatcccggagaaacatatggatgcagcaacgatacaacttttgagatgcaagtagattaccagggcctttaccttgttcgcgtaataaatgcagttgccaatgaaacaatgctg

SEQ ID NO: 438 - DNA, 386 bp, Gossypium hirsutum
  Clone ID: LIB3493-029-P1-M1-B5
ctccaggttcaccaggaacgaggtcagcctcgagtccaagtctactattggcgttgagttcgctactcgtagtttgaatgtggatggcaaggtcattaaagctcagatttgggacactgctggtcaagaaaggtaccgtgcaataacaagtgcctattaccgaggagctgtgggagcactccttgtgtacgacgttacacgccactccacattcgaaaatgtagagaggtggctaagagagttgagggatcatacagatcccaacatcgtagtcatgcttgtcggaaacaaatcagatcttcgtcacctcgtggctgtctcaaccgaggacgggaaatcctttgctgagaaagaatccctttacttcatggaaacttctgctctgg

SEQ ID NO: 439 - DNA, 385 bp, Gossypium hirsutum
  Clone ID: LIB3493-029-P1-M1-B6
cggacgcgtgggttgcagactttattgggtagcaaaattgttaactacatgattgtagtgtttactggtggggatgaactggaagaaaacgaggaaacattggaagattatttgggccgcgagtgcccacagccattaaaggacattctaggtctttgtggaaaccgacttgtactttttgacaacaagactaaggatgaaaccaagagagtgacacaagttcaggatcttctcacacttgtgaacatggtcataggacagaatggtgggcaaccatatactgatgagttgtttgcggaactgaagaaaggggcaactaaacttcgtgatcaacaagaagtggttgctgctctaaagggctactccaagcgagaaatattcgaat

SEQ ID NO: 440 - DNA, 244 bp, Gossypium hirsutum
  unsure (1)..(244): unsure at all n locations; Clone ID: LIB3493-029-P1-M1-B7
aaagagactgcgccaagcagcggttcaacttgactgaccgtccagcatcgtcttggccctcgattttgcccttttgtaaacctttttttcaccaattcccgaaatggcagtgaaaccctccaaggccgataagaaaatcgcgtactactcgaaactgtgccagctcttanatgaatacacgcagatcttgatcgccgcagccgacaatgtttgctcgaagcaactccagaacattcggaaaggt

SEQ ID NO: 441 - DNA, 310 bp, Gossypium hirsutum
  Clone ID: LIB3493-029-P1-M1-B8
caaaaacatcatccctgtcgtgataatgaagacagtctggactattttctcggtacttgtattcaccgtaatctcccccgccaacggctgccctccgtcggaccgcgctgcgctgctagcattcaaagcagctctccacgagccttacttgggcatcttcaactcatggacgggcaccgactgctgccacaactggtacggcgttagctgcgacccacagtcacatcgagtcgccgacattaatcttcgtggtgagtccgaagatcccatctttgagcgagctcaccggaccggttttatgactgggttt

SEQ ID NO: 442 - DNA, 224 bp, Gossypium hirsutum
  unsure (1)..(224): unsure at all n locations; Clone ID: LIB3493-029-P1-M1-B9
ctttcaagaaacctctgctttgccttacaagaggatgagtactaggcgttgcttttgtagctctgccccgcggccatggctgtttgtgggtctaggcaaccctggtgaggaatataaatgtacatgacacaatgtgggttttgagatgatcgactcatttgctaaagctcnnggcattgacttgaatactctttattgctaggttattctttgttcattgtttt

SEQ ID NO: 443 - DNA, 321 bp, Gossypium hirsutum
  Clone ID: LIB3493-029-P1-M1-C1
gtgagaccatcaacgataaggggccgggtctcacaatgcagaggcgagaaggttgttcaggagaagaaagtcttggaggttaatgttgaaaagggtatgcagaacggacagaagattactttccctggagaagcagatgaagcacccgacacagttactggggatattgtatttgtcctccaacagaaagatcatccaaaatttaaacggaagggtgatgacttatttgtagaacatacgttgacacttactgaggcactttgtggctttcagtttatactgacccacctagatggcaggcaacttctcattaagacccat

SEQ ID NO: 444 - DNA, 380 bp, Gossypium hirsutum
  Clone ID: LIB3493-029-P1-M1-C10
cctcactccgccatcttcaatgatttcttccgttgatctttgttagagattagctttttaatttttcattatgggaaagatcaagatcggaatcaatggatttggaaggatcgggcgtttggttgcgagagttgctctccaaagcgatgatattgagctcgttgctgttaacgatcctttcatcaccactgaatacatgacctacatgtttaagtacgacagtgttcacggtcaatggaagcatcatgagcttaaggtgaaggactcaaagacccttctctttggtgaaaagcctgtcacagttttcggtatcagaaaccctgaggaaatcccatgggctgaggctggagctgagtatgttgttgagtctactggtgttt

SEQ ID NO: 445 - DNA, 376 bp, Gossypium hirsutum
  Clone ID: LIB3493-029-P1-M1-C11
cccacgcgtccgcgacgaaccggtcattattacacaccggtttccattacttctctgaccaaaactccgcctctgacaccacctgccgccaccaatgtccatcgccgcctgccttctcaccccttccccactttcctctcctagttcccttaccatcacccctaaattccccaccactttccctctccacctccacctccgcctttcctcctccgccacctgtctccgtcacagccgatcttccccgttcttaaccttctgcgccggcggcgatggtggtgatattaacagcaacaacaacaactcgggtggcggtggtggaaacgatgagaatggaaaacacaggggtggggatgactagaatgcgggtgactag

SEQ ID NO: 446 - DNA, 380 bp, Gossypium hirsutum
  Clone ID: LIB3493-029-P1-M1-C12
gggcaatccttcgtccgagcaggcccagattcattctccaggacaccaccgtctacggtttcaacgcctccgtccccaatttcctaacttccagtttccaagtcaccgtatcgtctcgaaaccccaatgacagaataggaatatactacgacaggctcgacctctacgccacctacaggaaccaacagatcacaccccggacctcactccctcccacttaccagggtcacaaggatgtcaacgtttggtcgcctttcataaacgggaacatgatacctatctccccggacttttccacgtctttaagttcggaacaggcttccggggcggtttttcttaccattaagattgatgggcgggtgagatggaaagttggagct

SEQ ID NO: 447 - DNA, 168 bp, Gossypium hirsutum
  Clone ID: LIB3493-029-P1-M1-C2
ctaagatccccaactctttttgttttgttgttcttgatggggcctttgggtatcttatttaaacaataataataaaccctttctttagtttttttcttcttttttgaaagagaaaggataaaataaaaatggcactagaagctgttgtttttcatctagatttttttt

SEQ ID NO: 448 - DNA, 218 bp, Gossypium hirsutum
  Clone ID: LIB3493-029-P1-M1-C3
gatcgaatggttatgctcgcagaggcgctcgagtatcaagatttcgacaaatttgatcgcgtaaaggttcctaaaattcgttatgctggaatgctccaatatgatggtgagttgaagcttccaggccgctaccttgtttctccccccgagattgacagaacatccggcgaatatttggtgcacaatggtgtacgtacttttgcgtgcagtgaggacag

SEQ ID NO: 449 - DNA, 259 bp, Gossypium hirsutum
  Clone ID: LIB3493-029-P1-M1-C4
aaaaaaaatgaagtctcagatgtgtttggcctttggaactctggccttgttgttagcttcagctttggccgatgacgtcgtcgtactgaccgaagcgaacttctataaggaagggggtcaagatagaggagctctcatcgagttctatgctcctaggtgtggacactgtaagaagctagctcctgagtacgagaagctcggggcaagtgttaagaaggctaaattcgttttgattgtaaaggtggattgtgatgaacat

SEQ ID NO: 450 - DNA, 386 bp, Gossypium hirsutum
  Clone ID: LIB3493-029-P1-M1-C5
aaccggagctactgccgtcgtggccggggtggtgaagtttctgaaatccaacaaggccgtgattgtcctccaaggccgatatgctgggcgcaaagcggtgatcgttagatccttcgacgatggaacacgtgaccgcccctatggccactgtttggttgcagggataaagaagtacccgagcaaggtcatccgcaaggattccgccaagaaaacagcaaagaaatcgcgcgtcaagtgcttcgtcaagctcgtcaactaccagcacctgatgcccacccgctacaccctcgacgtagacttgaaagacgtggttaccgtcgatgcacttcagaccaaggacaagaaagtggcggcttgcaaggcgaccaaagagaggttcgaagaga

SEQ ID NO: 451 - DNA, 385 bp, Gossypium hirsutum
  Clone ID: LIB3493-029-P1-M1-C6
cggacgcgtgggcggacgcgtgggcgggcgcgtgggcggacgcgtgggtggagacctcgtcatttccatcgagaagcttcaagagatccaagatgagcttgagaagatcaatgaagaggcaagcgagaaagtcttggaagtggagcagaaatacaatgaggttcgcaagccggtctatgataagcggattgaaatcatcaattcaattcctgatttctggttaacagctttcttgagccatcctgctcttggtgatcttttgactgaagaggaccagaagatattcaaatatattaactcacttgaagtggaggattttaaagatctgaaatctggatacactatcacatttaacttcaattccaatccatactttgaaaataca

SEQ ID NO: 452 - DNA, 384 bp, Gossypium hirsutum
  unsure (1)..(384): unsure at all n locations; Clone ID: LIB3493-029-P1-M1-C7
ttttagattcttgaatggtccgccgatatttatgcgattgcatcccatcnccgatctctcctctttacattttcatctacccgacgattttttcctgatctaaaaacctttgcttcggagaaaactacgccgaggaacagcatagcgaaatcggcggttgtcggttagggaggaaggcaaaaagaatgtcggccgaacagaaagaacaagaacctaaccctaaccctaaccctaatggtaacggcaacggcaatgaaaatttgaacactgaaagtgaacatgaagaaagacaagaagacaggcaagaacatgaacaggaacaggaacaggaacgagagcagccgccacgtcagtcttcgacaagaactcctttcactaatctca

SEQ ID NO: 453 - DNA, 350 bp, Gossypium hirsutum
  Clone ID: LIB3493-029-P1-M1-C8
tggtgggagttgtttcatggcacatgaaggcctccaccatgtgtgaatattccaaggaggaatttttcactgggttgcaggcactagggatagattctttggagaagtttcgtgagaggataccatttatgcgttctgagctgaaagatgaacaaaaattccgtgagatatataactttgcatttggctgggcaaaagaaaagggtcagaaatctttggcattggatactgcaatcggtatgtggcagttgctgttcgctgagaagcaatggccataggttgaccattggtgccagtttttacaggctcaacataacaaagcgatctcttggtacacatgatctcaactt

SEQ ID NO: 454 - DNA, 87 bp, Gossypium hirsutum
  Clone ID: LIB3493-029-P1-M1-C9
ctgtcctctcctcctggacgggttctaaaataactggggctgacccatttattctacccttcaccattcttgcccactccttcatgg

SEQ ID NO: 455 - DNA, 383 bp, Gossypium hirsutum
  Clone ID: LIB3493-029-P1-M1-D1
caccattctaaagaggtcatcgtaaggtcgagtacaaagcgctaaccgagatgagagccaagtggaagaagaagcgtatgaggaggctgaagaggaagcgccgaaagatgagacagagatccaagtagatgcgccttggactgaattagttttgccctgacaatcccttgtcttcataattatcctgcatatgttgcattaagttgtgaagattgaagggtattttcaggcaaccttatctgttttgtcttctatatctcggttaaagttttaagactgtttgagatgtttgtctagtactattagatattatgttgggggatttggggttgatctgtggtagcagttatcttaacatcctaaatgtttggaattgaaacttt

SEQ ID NO: 456 - DNA, 377 bp, Gossypium hirsutum
  Clone ID: LIB3493-029-P1-M1-D10
ctgatatatgcgtgaaagcatggcatgatatgacagcaagaaataagagctttgatgtctgtcatgaatatgttgctgagcaagggagggaactttatgagctggttgcccatttgccagacaaagcaaataattatttaactccggccttgtctgttttggaaaaaaacacttgacattcatttaagggataacatgttatcaacctctgagaaacggcatcctgtcggaactgcttaaacaagatggaagtcccataatgatctctttggaagtcagcaacaaatttttatgttctcttttgctcagatgatgtttgccctctatgttacgcatagtttttgtttactgtaaatccatgtgtagtctcatataga

SEQ ID NO: 457 - DNA, 379 bp, Gossypium hirsutum
  Clone ID: LIB3493-029-P1-M1-D11
cccacgcgtccggcaggttcgtgcgcaagggactcagaacgagaatgatccaaataatacgactatatttgttggtaatttggattctaacgtgactgaagaccatttgagagaggtcttcagcccatatggtcagttggtgcatgtgaagattccacaaaacaagcgttgtggatttgttcaatttgctgataggagttgtgctgaagaagcactccgaatactgaacgggactcagttgggtggacaaagtattcggctttcatggggtcgtagcacatcaaacaagcaggcccaagcagatccaaaccagtggaacgctggatattatggatacagccaaggatatggttatggctatggcgctgccccacaagac

SEQ ID NO: 458 - DNA, 367 bp, Gossypium hirsutum
  Clone ID: LIB3493-029-P1-M1-D12
cgacacccttttgattattggaacaaggcattggatcaatcaataattcaatcgaaaccgaaatcggcaatgggcacgacgggtgggagcgacgtggaggcgggattcgccaagctacaaggcgaagacttcgaatactacatgcaaacctactccataatgctcggccgcaactccaagaaatccaccgtcgacgtcgacttagccagcctcggcggcggtatgaacatttcccgccaccatgctcgcatcttctacgacttcacccgacgtcgtttcgcgcttgaagtcctcggaaaaaacggctgcctcgtcgaaggcgtcctccaccttcctggtaaccctcccgtcaagctggattcacaag

SEQ ID NO: 459 - DNA, 421 bp, Gossypium hirsutum
  unsure (1)..(421): unsure at all n locations; Clone ID: LIB3493-029-P1-M1-D2
gccatatgtttggttattccagtgaggaatcctcagaattcagtgcctctcanccatgtccttgcaactaagcttggtgcacgtcttactgaggttaggatgaatggtacctgcccctggctaatgcctttttgtaaatcacaggttactgttgattactacttcgtttttggtgccatgtgttcattttttgtttacactttttttcttttttttttcttcatttattaatttttattttattttttttaattttttattttattttttagtagtgtagtttatttatttttttatttacttttttcatttattttttttttttttttttttattatttttattctttttttttttttatttattttctttttattttttttattatcttatttttttttttttttttttattattttta

SEQ ID NO: 460 - DNA, 384 bp, Gossypium hirsutum
  Clone ID: LIB3493-029-P1-M1-D3
gacaaatctaagatttctatgggttggagaaatctagggtttttgtatctcataatttgaccacataaatactcaaacccccacactcaattctcccctcttttcagctttgcttcaaatttcgatctcatttcccctaaattccgtcttttttcttcaaattccccacaaatggccgtcactttctcagatctccacaccgaatctggccttaaatcccttaacgacttcctcaccggcaaatcttacatctctggggataagctgactaaggatgacataaaagtttatgctgctgttttgaaaaatcctggtgattcatttcccaatgtgagccaatggtataactgtgtgtcttcccatctcgctgctagcttccctggg

SEQ ID NO: 461 - DNA, 385 bp, Gossypium hirsutum
  Clone ID: LIB3493-029-P1-M1-D4
cccacgcgtccgctctctgctggggggactactgaaatccctgcctataatcaatctcttagcaaagggccaagctatagacaatggcagaaggcgaagaggatctgccgagggatgctaagattgtcaagtcactgcttaaatcaatgggcgtggaggactatgaacctcgcgttatccatcaatttctcgagctttggtatcgctatgtcgtggatgtactgacggatgcgcaggtgtactctgaacatgccggcaagcaaaccatcgattgcgatgatgtcaagcttgctattcaatctaaagtcaatttcagcttctcgcaacccccacccagagaggtgcttttggagttggcaagaaataggaacaaagttccattgcc

SEQ ID NO: 462 - DNA, 347 bp, Gossypium hirsutum
  Clone ID: LIB3493-029-P1-M1-D5
gtcttgatattcctcacgttgggcacgtggtgaactttgaccttcctaatgatatcgatgactatgttcatcgaattggacgtacagggcgtgcaggcaaaactggtttagccacagccttcttcaatgagaacaatactaatatggcaaaggcattagcagatctaatgcaagaagcgaatcaagaggtacctgcttggctcactcgatatgcagctcgttcattcggagggaggaatcgtcgtcctggaggaggaggaggccgatttggtggacgtgactttcgaagggattcatcttacaacaggggtggttcagattactacagtggaggcaacaacaattca

SEQ ID NO: 463 - DNA, 381 bp, Gossypium hirsutum
  Clone ID: LIB3493-029-P1-M1-D6
aggagattaccaaggaagaatgggctgcgttttacaagagccttacaaatgactgggaagagcatttggccgtcaagcacttctcagttgaggggcaacttgagttcaaggctgtcctctttgtccccaagagggctccttttgatctctttgatacaaggaagaagcccaacaacattaagctctatgtgagacgtgtctttatcatggacaactgcgaggagttgattcctgaattcctcagctttgttaagggtattgtcgactcagaggaccttcctttgaacatctcaagagaaatgttgcagcaaaacaagatcttgaaggttatccgcaagaacttggtaaagaagtgcattgagctcttctttgaaatagcag

SEQ ID NO: 464 - DNA, 181 bp, Gossypium hirsutum
  unsure (1)..(181): unsure at all n locations; Clone ID: LIB3493-029-P1-M1-D7
gctcagggtctgcaaagggggtctcttttacaattgcgtcttgctggggggtaactgatgtgagtcttgaagccattggaaagggatgcgctaacctgaagcagatgtgccttcgcaggtgttgcttcgtatctggtgatggattggtggcgcttgccaagtctgctggnnctcttgagtg

SEQ ID NO: 465 - DNA, 371 bp, Gossypium hirsutum
  Clone ID: LIB3493-029-P1-M1-D8
ctttccaccggcgccagcattggtattgccgtggggtcggcattcgcagcgttactattactgttattcctcattctttgcctccggaagcggcaacggcagccgtcgaagcagcagaagccggttgcggccggcgcaagggcggttccgccggcggaggctggaacctcctcgtcgaaagatgatatcaccggagcatcaacagaaggggaaaggaataagctggtgttcttcgaaggtggggtttatagcttcgatctggaggatttgttaagggcttcagctgaagtattgggaaaaggtagtgtcggaacatcgtacaaggcagtgctagaagaaaggacgacggtggtcgttaaacggttaaaaga

SEQ ID NO: 466 - DNA, 277 bp, Gossypium hirsutum
  Clone ID: LIB3493-029-P1-M1-D9
gcttcagctgttgttagtgctgttcgaattgtcggtgaccgtaaatctatcaagcatccaattatctgtagtgaaagtggtagagctattgtttcccatcattgtattttgatatttgatgctatttctgctactgctcctactaccccagcaatgaaccaagttgaccttccatttattttggagggtctctcggaggatgctcgtgtcaattgttgtaacttgagccaggcagcaatgagacatgagactgagacctggttcgtttatgctgatc

SEQ ID NO: 467 - DNA, 89 bp, Gossypium hirsutum
  unsure (1)..(89): unsure at all n locations; Clone ID: LIB3493-029-P1-M1-E10
cggactcgtggttttggatagggtttaattaagagatgggctaagttaatccaattnattcacataaaantatactattattatgtaat

SEQ ID NO: 468 - DNA, 346 bp, Gossypium hirsutum
  Clone ID: LIB3493-029-P1-M1-E11
gtggaatccggcagcgcgcatggggtaaatgggctgctgagatccgtgacccaaggaaaggggttagggtctggttaggaactttcaatactgctgaagaagctgcgagagcttatgatgctgaggcacggagaattcgtggtaagaaagctaaggtgaacttccctaacgagactccgcgtacctctccaaagcatgcagtcaagacaaattctcagaaaccactttccaagtcaaatttgagccctgttcagccaaatcttaaccagaattacaatttctttaaccagcctgagcaggaatactttgataccatgggtttcgtagaagagaagccatcggtcaa

SEQ ID NO: 469 - DNA, 375 bp, Gossypium hirsutum
  Clone ID: LIB3493-029-P1-M1-E12
actccctcttcttttggtctcggcttttccttcccattctttgtcttagcccccttttttttgggtttttttcagctgatctttgtccatggattttgattagcttttctgttgattttctgggaaaaaaggtttgatctcttttgggtagtttatggaggaaattatcagcacctttctcaattcttttttaataattagtaaattgacaaatttatgagtttttttttggttttaaattatttgttttctgattaagataggaaaaaaaacccaaatttaagattccttttttcttctccttttttgcaaattataaagtttttcaggcatcaatctttatttgtttctttttatcttttggccgattctgag

SEQ ID NO: 470 - DNA, 256 bp, Gossypium hirsutum
  unsure (1)..(256): unsure at all n locations; Clone ID: LIB3493-029-P1-M1-E2
taaaaaaaagatggcgtctgtaggaaaggctgcaatcttagttctgtgcggtctttttatttntattcttttaaattaattttttttttatttacttatctttttttttttttttttttttntttggcaaacacttcactcttttcttctttttctttcctttttcttattctctatattattttttttctttactttaattaactttcatttactntttttgtgttttctttatctacttttttttttttttttt

SEQ ID NO: 471 - DNA, 223 bp, Gossypium hirsutum
  unsure (1)..(223): unsure at all n locations; Clone ID: LIB3493-029-P1-M1-E4
cttccctttgtcttcacccttgggctggcccattttttgatttggattttcaatttnccccttaatctgttcttcgttaacatctccagcaatccccaattttcaatttcgtgttgttcactgcataagttttttttagaaacctaaattcgatcacaatagaaatctcatggcctcttctggatacaagaacatcaatgctaaattagttctacttgtggat

SEQ ID NO: 472 - DNA, 385 bp, Gossypium hirsutum
  Clone ID: LIB3493-029-P1-M1-E5
gccatccacggtggtggatctggtgggggacaacaagattcaaaaagtgaagctttttgaagctgacccattggtgctaagagctttgatggggagtgggattcaggtcatggttgggatacccaatgagatgttggctgctctcagctcttcccccgccgctgctgatttgtgggttcgccaaaatgtatctgcttatgttggcaaaggtggtgctgatatcaggtttattgctgtcggaaatgaacctttccttacaagttacaacggtcaatttcagtcctatgtaatccctgctatggcgaatttgcagcagtctctggtcagagcaaatcttgctggatacataaagttggtagttccttgtaatgctgatgcctacgaa

SEQ ID NO: 473 - DNA, 96 bp, Gossypium hirsutum
  Clone ID: LIB3493-029-P1-M1-E6
acagagacttgcctctgatttgctttcgaattacatatggttgggcgttgggagggttggttcaagtacagatttgattgttcaaagggttgaatt

SEQ ID NO: 474 - DNA, 203 bp, Gossypium hirsutum
  Clone ID: LIB3493-029-P1-M1-E7
aaatgctctggctcacgtaaggcatggaagacggctggagcagccattccttacggcggtgcaaaaggtggcattggatgcaatcctagggatttaagtaagagggaattggaacgtttatctttcgtgtttactcataatatccatgatcttatcggttttcatacagttggttttgctccagatttgttgacttatgttca

SEQ ID NO: 475 - DNA, 381 bp, Gossypium hirsutum
  Clone ID: LIB3493-029-P1-M1-E8
cttcaaatcaatatctggaacgaaccttccaccaaagggcgaccaagatctccgtctcgccatggaagagatgcaaaaagccaattacttcacctttgtaatgttgctcaacatgttgcccctcgacccaaagttccttgctaacgtaacttttttaatgcccaatgatcggatgttgtcaaaaacggtaataccagagaacgcggtttccaacttcttgcatcgtcattcaatcccttcaccgttaattttcgagcatattttatatatcccgacgggttcgattcttcccagtttaatgccagagtacttgatgaatgtctcgaatggcggtggtcgaagaagtttcgtcctcaataatgttaaaatcattagcccgaa

SEQ ID NO: 476 - DNA, 363 bp, Gossypium hirsutum
  Clone ID: LIB3493-029-P1-M1-E9
aatgactgtcaactatgtgacgttttcaagaatctgcgtgaccaacaatggccatcattaatagtttaagcataccaacatatattcctttgaaaacccaatcctttttcagtcctaaatcgaaggcttttagtgttcttaacaaaccccgaaaagttcccttctcagttcaatcgatgggttcttctgcttcttcacaaagacccgagaataacaacgctgttcaagatatcaatggtgcgtcccttgcagagacagctgcagttgactatacttctttaagtgattaagaatggaataataggcttactcctgaacaattttatattacttcttaaaaggggacccttcgagctttcactt

SEQ ID NO: 477 - DNA, 331 bp, Gossypium hirsutum
  Clone ID: LIB3493-029-P1-M1-F10
agaaaactcaacattacgcaggcgctacgcctcgacgtcttctttgatttgatatctcaactgagcttggtgaaaatggacaaaaatttgatggataaagttagtgcctttggtgaacgcctcaaagttgaaggagctgaggtgggtagaaaggtgagtgctggcatgagttcaatgagcttcaagatgaaggagctcttccaaggccctaacccagctgatcaacttgtcgaggatgccacctctgaggcccttgatgagcctgattgggccgtgaatcttgatatttgtgacatgataaaccatgaaagagttaacagtgtagatttaa

SEQ ID NO: 478 - DNA, 379 bp, Gossypium hirsutum
  unsure (1)..(379): unsure at all n locations; Clone ID: LIB3493-029-P1-M1-F11
atctggggctgtgccatgttgggacaatgtttgctttggtcgtcatgtggtttggaatttcagttccacttgtttttgtgggtggttacattgggttcaagaagccagcaattgaggatccggtgaagacaaataaaattcccaggcaaatccctgagcaggcttggtatatgaacccaattttctccattctgattggaggaatactcccatttggagccgttttcatcgagcttttcttcattcttacctcaatctggctgaaccagttctactacatctttggtttcctcttcttggtcttcattatcctccttattanttgtgctgaaataaccattgtgctttgctacttttagttgtgcaacgaagattacct

SEQ ID NO: 479 - DNA, 382 bp, Gossypium hirsutum
  Clone ID: LIB3493-029-P1-M1-F12
gtttccttgcatgttcgatctgggtttcgggacgacccaccactttcctcgaagattttagaatcacttggtccgattcccatatcaagcaaatcgatggagggagggccattcaacttattctagaccaaaattcaggctgtggatttgcttccaaaagacagtatttgtttggacgtgtcagcatgaagatcaagcttatccccggtgactcggccggaaccgtcaccgccttttacatgaattctgatacggacactgtaagagacgagctagatttcgagttcttgggaaaccgaactgggcaaccatacacggtccaaaccaacatatatgctcatggtaaaggtgatagagaacaaagggttaacctctggtttga

SEQ ID NO: 480 - DNA, 377 bp, Gossypium hirsutum
  Clone ID: LIB3493-029-P1-M1-F2
cccacgcgtccgcggactcagggcttgctcggaacatttgaaacaagatgggttgttgtacacaacgtgtggaacgccggcgtatgtggcgccggaagttattgctaaaaaaggatacgatggatctaaagctgatatttggtcttgtggggtgattctatatgttcttcttgctgggtttttaccatttcaagatgataatttggtggcaatgtacagaaagatttacagaggagattacaagtgttcgccatggttttcctctgaagctcgtaggtttatcacttaactattagaatccaatcctcattctcgaattatcatattaaagatcatggatttatctttgtttaaaaaatcttatacccaatattgtt

SEQ ID NO: 481 - DNA, 373 bp, Gossypium hirsutum
  Clone ID: LIB3493-029-P1-M1-F3
aagggcgctttcttcttataaggaaaggttcagtttgagaactggtcgttcgctcatgtatctcttcactaatactaacaccagaaagatcggtccgaaggagttcacttcagtgttctatagtcttcagaattggagggccatctttgagagattcgatagggacaggagtggcaaaatagatgccaatgaactgagagaagcacttttgagtctcggattttcagtctctcctggtgttttggatttgcttgtctcaaagtttgataaaactggacgcaaaaacaaggccattgaatatgacaacttcatcgagtgctgccttacagttaaaggactaactgagaaattcaaggagaaggatgccatgtac

SEQ ID NO: 482 - DNA, 386 bp, Gossypium hirsutum
  Clone ID: LIB3493-029-P1-M1-F4
cggacgcgtgggctgagcgtgagcgcggtataaccattgatattgccttgtggaagtttgagacaaccaagtactactgcactgtcattgatgctcctggacatcgcgacttcattaagaatatgattacgggtacttctcaagctgactgtgctgtccttatcattgactccacaactggaggttttgaagctggtatttccaaggatgggcagacccgtgagcatgctctccttgccttcactcttggtgtcaagcaaatgatttgctgctgcaacaagatggatgccacaacccccaagtactcaaaggcaaggtatgatgaaattgttaaggaagtttcttcctacctgaagaaggttggttacaaccctgagaagattcca

SEQ ID NO: 483 - DNA, 386 bp, Gossypium hirsutum
  Clone ID: LIB3493-029-P1-M1-F5
actcgcccctcccttcctctgtgcttggactttgctaagtccaagccttcgacaatggccgaaccctctaccatttcaccagctcccctcttgaaagatgagctcgacatagtcattccaaccattcggaacttggactttttggagatgtggaggccctttttccagccttaccatctcatcattgttcaagatggtgatccttccaagaccatcaaggttccggagggcttcgactatgagctttacaataggaacgatatcaacaggattttgggtcctaagtcttcttgtatctctttcaaggattctgcttgtcgctgctttggttacatggtttccaagaagaagtacatttataccattgatgatgattgctttgttgc

SEQ ID NO: 484 - DNA, 387 bp, Gossypium hirsutum
  Clone ID: LIB3493-029-P1-M1-F6
gcaaagtgtcttggccattgaggctagggacaagcataattacattcacagagacattaaacctgacaaccttcttctggacaaaaatggtcacatgaagttatcagattttggcctttgtaagcctattgattgtgcaaatttaccagcaatctatgagaataagcccatggatgatgagaatatgacagaacctatggatattgatggatgtattactgataagagcagttttagaagccctcgtgagcagcttcagcattggcagatgaacagaagaaagttggcattttcaactgtgggaacgcctgattacatagctcctgaagtgttactgaagaaaggatatggcatggaatgtgactggtggtcattaggagcaataat

SEQ ID NO: 485 - DNA, 362 bp, Gossypium hirsutum
  Clone ID: LIB3493-029-P1-M1-F8
cggacgcttgggcggacgcggggggcgattttactattgattcccttgtcaatttttattgtgtttctactactacttctattttttcatagctatcttattctgacaaatcagacaacttatgaactcgttagacgcaggcgaatcccatatctaagggggattcctgagcgagtatatccttttagtaaaggagtttgccacaatttatacgacttctgttgtggtggaagcaacatatacagtttggaacctctgccctcagctcaagagcttgaagaaaagtcaaggccctacacttgcttagatgttttaacatgccgttgctgctgacattataaggcaatatatcatttaccata

SEQ ID NO: 486 - DNA, 368 bp, Gossypium hirsutum
  Clone ID: LIB3493-029-P1-M1-F9
cggacgcgtggggaagggacgcggggtaattcaagaccgcaggacatcagtgcggctgaagcaggatgggcacatgcagcaaatcgattgattgaggctgaaaacgaacctgaaatgattgaagattggccgcctgtgcttagatcaaaaagaaggcttatcttgacaacacagcttatgcagcaactacattgtgctcctccaagagcagttctttctgcagatgctataaaaaactatgagactgtggtctattttgttgccagattaggcttaggagaagcatgcagctcagcatatatatgtgaaagtgataaagctgttccttctgagagtggaagcacccttcctgaaaaggttaagaatag

SEQ ID NO: 487 - DNA, 287 bp, Gossypium hirsutum
  unsure (1)..(287): unsure at all n locations; Clone ID: LIB3493-029-P1-M1-G1
gtttcattgaaggctgnactcgcagagttctaaatcaaagcagcgccaccatcacccccaaaaaacaaagcaaattgtagaagatggcaacacaagcacttgtatcatcgtctcttacctactcattttatactgcaaggcagattctaacaactaaacgacaaattgtgcctccaaggaaaggatccttctacattatgctccttcaaaatcaaccctttaatcaaataactttaaaaaccttttaataacttctatctattctagttgccagaattactccttat

SEQ ID NO: 488 - DNA, 357 bp, Gossypium hirsutum
  Clone ID: LIB3493-029-P1-M1-G11
cggatggctgcacaccttgaagccaaggagggaaaggcatctgaagcttttcttagaaagtatcgtcttcatgggaacttgggggaatcagaggacattgatattgtggcactaaagaactacatggatgctcagtactttggtgagattggtattggcactcctacacagaacttcactgtgatatttgacactgggagttctaatttgtgggtttcttcatctaaatgttatttctcgatagcatgctatttccatccaaaatataaatcaagctgtacacgtacctacaatgctaatggtaaaccagcggatatcctatatggcactggggctattttaagattctttatttat

SEQ ID NO: 489 - DNA, 340 bp, Gossypium hirsutum
  Clone ID: LIB3493-029-P1-M1-G12
ctcaacccgaaacagctttctcgatcaacgaccatctgcgagtaatggataacatagtagattccttaaacaaagcctaccaagaatttgttgcagcagcaggtaatgtcctcgaaactaagggatcttcggctgcccaaaagacggaatccaccgatacggcattggaaagctttaaacaaaaatgggaaaccttcggactggcttgcgatcaagctgaggagtttgttgagtcaatcaaacaaaggataggatccgagtgcttagtcgatgaagccaccgtgaattcgtcggagccgtcgactgggctgccccccattatatgtcgtacgtttgtagt

SEQ ID NO: 490 - DNA, 122 bp, Gossypium hirsutum
  unsure (1)..(122): unsure at all n locations; Clone ID: LIB3493-029-P1-M1-G2
atctctctttctctctctctctggagagtaaatttgtcgtggtgcttgaaccacaataataatgcctganaaaatatcagatgacttatttaacaatctagtatataccagggcagatagtg

SEQ ID NO: 491 - DNA, 147 bp, Gossypium hirsutum
  unsure (1)..(147): unsure at all n locations; Clone ID: LIB3493-029-P1-M1-G3
ggatgatgatcttggcatgagtgcactgtatgtatctacgaggagaggctgntctangaatgcancatctaaattttcatggtattggagttnttccattttttcatttctggctgaattccacttttttttttttttttatttttt

SEQ ID NO: 492 - DNA, 232 bp, Gossypium hirsutum
  Clone ID: LIB3493-029-P1-M1-G4
ccccaaaactggctgattacttgacacgttttcgagctgacagtatcgtgaacgatgctgaattcatccgtgttcgtcttgttcccgaagctaggccttggagtgttctgggtcagagttatggtggtttttgtggtgttacttatctgagttttgcaccccaaggtttgattcttgtgcttttaacaggagggataccttcaattggagatggatgtactgcatattctgt

SEQ ID NO: 493 - DNA, 74 bp, Gossypium hirsutum
  Clone ID: LIB3493-029-P1-M1-G6
caaaaaacaagtctcctcctctgttttgctttttctttaggctgggctatcaataatattcaattccttattcc

SEQ ID NO: 494 - DNA, 172 bp, Gossypium hirsutum
  unsure (1)..(172): unsure at all n locations; Clone ID: LIB3493-029-P1-M1-G9
gaagaaaggaaagcctggcgtggatgaatatggtaacacgggggaagatgttnatccggaaactggtggtcctgcttctgtaccagttccattacctgatatgggcctgccaccttcctttgatggtgataatccagcattcatgtaccggttcttggaacctacttcgcag

SEQ ID NO: 495 - DNA, 373 bp, Gossypium hirsutum
  Clone ID: LIB3493-029-P1-M1-H1
cccacgcgtccgcggacgcgtgggagggtatataaaacccactgtctgccattttactggttttctacatctttagcatgaaacttgaaaccaatgtttttattgcttaaaacctccgaactgcatttctggtaaaaattttgaacctttgacctttctttaacaacttttgaggcatttacaataaatttcatcctgattaattatattgataatcctcattgctattgtaagtgcaacatttaacatccctttatgtccttccaacttttgaggcatttaatcatattgataatcctcattgctattgctattgtaattgccttcatatttacagctgtatgtaatgttcaatctgtaatgaagttgattg

SEQ ID NO: 496 - DNA, 168 bp, Gossypium hirsutum
  unsure (1)..(168): unsure at all n locations; Clone ID: LIB3493-029-P1-M1-H10
gtaatggcaaatactaggccgggaatattcccttgaatgatgggatggatgatgagagttttcggggtctatttcgtcctatcatccaaaaggtcatggtagtgtgtcaaccanatgcagttgttcttcaatgtggtgcagattcattgtctggtgacagattgggtt

SEQ ID NO: 497 - DNA, 138 bp, Gossypium hirsutum
  Clone ID: LIB3493-029-P1-M1-H11
aatctgctcttactatagggtggttaaaaaaaaagcatgggtttacacaacctatcaagttcaattgggcatattctatttttcatagatagtatacatcaccttcactttaacattttttttttttatttcattctt

SEQ ID NO: 498 - DNA, 220 bp, Gossypium hirsutum
  Clone ID: LIB3493-029-P1-M1-H12
cggacccctgggaaacagaccagaaatcaaatccgctgaaatttttccctcaaagttccaccgtgaaatcaggaagtcatcagctttttagtttttttacacctggggctgctataaatgattccgggttgctgcagcaaattattggctcggttctgatgggcattttgctctacgaaaatgtgatttgaaaaaattttggaaggggggttttcttttt

SEQ ID NO: 499 - DNA, 382 bp, Gossypium hirsutum
  Clone ID: LIB3493-029-P1-M1-H2
cggatatttcctatgtctttcgtgttgtgtatcaacatagtgttgggaaatgttagcttacgctatatcccggtttctttcatgcagactatcaaatcattcactccagcaaccaccgtttttctgcagtggctagtttggagaaagtactttgacaggcgaatttgggcctctttggttcctattgtcggaggaattctgctaacatctgttacagaacttagttttaacatgtttgggttttgtgctgccttatttggatgtttagctacttctacaaagactatccttgctgaatctctactgcacggatacaagttcgacagcataaacacggtttactacatggcaccttttgcaaccatgatcttggcagtcccag

SEQ ID NO: 500 - DNA, 381 bp, Gossypium hirsutum
  Clone ID: LIB3493-029-P1-M1-H3
tcctctcctctcctctcctctctgtatgactagggtttggcgtctgctcatttgtaagcagatatcctagttttcacaaaaagagaaaaaaactcaaaagagttattgtttcttggcttcttgctacaatgggagatgcagaaaatgcccttccaccttcaaagaagagggctgctggaagagaaatttctcgggataaccctggactcgatgatgaggaagattcttctgaacaagagactggaacttttaagagggctagtgaagaagtgttggcaaatagaagaattgtcaaagttcggagaaatcaaaccacttcaactgccttagcgaataccttctctgggattcggttgggcccccttactgaaccaaatgctt

SEQ ID NO: 501 - DNA, 130 bp, Gossypium hirsutum
  Clone ID: LIB3493-029-P1-M1-H4
ctctttttcactcttccaatctgcttcgtcttcatgaaaatggctgttgctaaggtctttctgttggggtttctcgcgatggtctctggtattcagggatatggtggtgggtgggcttatgccctttttt

SEQ ID NO: 502 - DNA, 178 bp, Gossypium hirsutum
  Clone ID: LIB3493-029-P1-M1-H5
cccacgcgtccggatcagcaaaggttggtttttgctgggaaacagctggaacatggaaggactttggctgattacaatattcaaaaggagtccactcttcaccttgttcttcgtctccgtggtgggttctaagccttaaggtcttccttaatatgggttttctggttttacttgaagg

SEQ ID NO: 503 - DNA, 59 bp, Gossypium hirsutum
  Clone ID: LIB3493-029-P1-M1-H6
acgtgcgaccggatttttaaccgggggggggggaaaataagggggggttcttccataag

SEQ ID NO: 504 - DNA, 298 bp, Gossypium hirsutum
  Clone ID: LIB3493-029-P1-M1-H7
ggggcaaccatttctgtgagggagtgccatattcgtggcgctgttgatttcattttcggaagcgggacatctttatatctgaacacggaaatattcgtggtaggagatccagaaggagatccggaaatggcaataattacagcacatgcgcgagaaagttcatcggaggacacgggttattcgttcgtgcatggcagaattacaggaacagcgaaggacgtatttttgggcagggcctggaagagcagtccgagggttgtttattcttatactgaaataggcgaaatcgtccattctg

SEQ ID NO: 505 - DNA, 355 bp, Gossypium hirsutum
  Clone ID: LIB3493-029-P1-M1-H8
ccgaagaggacccggagccatgggcccgacccgctccggtccctaaccaaactcttcctccaaccaccgccaccaccgccgccggtcatcggaaaaaaggtaccggtgttcgagcatggcttatactggactcgacatgccaaacccagatggtggaagccggaaaacatgctatcatgagacgtacgggtttgcccgctcgagatcttcggatcttggacccgctgttgtcgtacccatcgacgattcttggtcgagaaagggcgaacgtgattaatttggagcatattaaggcaatcatcacggctcaagaggttttgcttttaaattccaaggatcctttcgttactccctt

SEQ ID NO: 506 - DNA, 214 bp, Gossypium hirsutum
  Clone ID: LIB3493-029-P1-M1-H9
tagaaagttcttttccgacagggagcatacctgacgtagaaaacccaaagccaaagcgagggaaaggagagacgtataagacgttgttgaaagaagaatagagattatgacgttggctctctcttttgcaacgtctgcttcttatttcattactcgtcataatgcaaagccttctacggttatcaaaactaccttcatgactctgtaaccagcg

SEQ ID NO: 507 - DNA, 269 bp, Gossypium hirsutum
  unsure (1)..(269): unsure at all n locations; Clone ID: LIB3493-048-P1-M1-A1
caaattctcctacggagctaggcgtgagcaaaagcaactctgttggcaatacgtagcatgtttggaccactcttttcttaaaccatagtcgcgcaatatgtatatggtgtagagtgtctntgaagaatgaactgttcaatcaaaaatatagtatctagtaacagttcagtaatgtaaatgattgcccgttatataacaatttgtttaatatcactgtaagcaatggaaatggttttcatagatgaaacaataaatttcatgggtaattt

SEQ ID NO: 508 - DNA, 330 bp, Gossypium hirsutum
  Clone ID: LIB3493-048-P1-M1-A10
caagatactgagtgctgactattgagattggtagtcgctgcagatatggcaaagggggagaacaaactcaagctctattcttactggaggagctcctgctccttccgtatcagaattgcccttaacctcaaaggtctggaataccagtacatacccgtgaacttgcttaagggggagcaattcagtcctgaattccaaaagctgaaccctattgggtatgtaccggtgctggtggacggtgacatgatcatttcagactcttttgcgattttcatgtatctggaggagaaataccctcaacaccctttattgccatctgatcttgcaaag

SEQ ID NO: 509 - DNA, 354 bp, Gossypium hirsutum
  Clone ID: LIB3493-048-P1-M1-A11
gatgaaatagattccttgtgtggtgagcgaggtgagggcaacgagagtgaagcatcaagacgtatcaaaactgaacttcttgtgcagatgcagggtgttggacatagtgatcagaaagtcttagtgcttgcagcaacgaatactccctatgctcttgatcaggccatccgccgcccgtttgataagcgtatttacattcctctccctgaattgaaagctcgacaacatatgttcaaagtgcatttaagtgatactcctcacaacttgactgaaagggattttgaaagcttagcttcgcggaccggggggttttctgggtcaaatatatctggttgggttaaagatggtcttttt

SEQ ID NO: 510 - DNA, 337 bp, Gossypium hirsutum
  Clone ID: LIB3493-048-P1-M1-A12
taaaatctcagctcttcttttggtgtggcatgcttttcatttcctcagctactccagttcttggttgtcgttcatgtcgtaaagcacatcccaaggctaagcctattaaaaagccccatcctgttaaacccccaatccatgtaaaaccaccggttacagtccctccagtcactgtcccaccagtgacagtccctccaatagtaaaaccaccagttacagtcccaccagtgactgttcctcctgtgaagccaccagttgaactccctccgattgcaaaaccacccattacagtcccaccagtgactgttcctcctgtaaagccacctgttgatctccc

SEQ ID NO: 511 - DNA, 351 bp, Gossypium hirsutum
  unsure (1)..(351): unsure at all n locations; Clone ID: LIB3493-048-P1-M1-A2
ctgaaattcacaatcatggctaagggggtgatcatggcggttcttgtgattttggggacgatggtaacctcagcttatgcgcaagcaagttgtgcgcagaaccttgtgtcctgttatccttacctgaacaacgccacggccaaacctgaagacgactgctgtaacccgatcagacaaaccgtcgccaaagatcttccttgcctttgcaacctctataacgaccctaatacacttgcttncttcaacgtcactgtcccggaagctctcaagatctctcgtgaatgcggggtcagtactgatctcagcgcttgcaacgccacttntcccacctctgctccatccccgccagga

SEQ ID NO: 512 - DNA, 356 bp, Gossypium hirsutum
  Clone ID: LIB3493-048-P1-M1-A3
cggacgcttggcggacgcctggggtgaaaatcaaaatcagattaccagaaaagggaaaaaaaaagaaattttcttaatagcccaacagagcccagaaagttttaaccattaaaaccaaaccaaaaaactcaacctttgagtgttaattaacttttttttgtttttgaatcggtttatgtgaacatcgttggtactttcacaatgattttctccagaatcggccgctctctctcccgctcttctcgctctaatttccgaataaatgttatatcgaggaaactattaagatatgaatcgaatgtgccaagtcctgtaacaaatacgtgcatttcacgcgttaataaaaggttagggct

SEQ ID NO: 513 - DNA, 378 bp, Gossypium hirsutum
  Clone ID: LIB3493-048-P1-M1-A4
ggatcacatgacattaaaaagtgtgctgcggtgacagagcgtgttcttgctgcttgctacaaggctttgaatgatcaccatgtcatgcttgaaggtactcttttgaagcctaacatggtgacccctggttctgactccccgaaggttgccccagaggttattgctgagtacactgtccgtgccttgcagcgtaccgtccctgctgcagttcccgctattgtgttcttgtctggtgggcaaagtgaggaggaggctacccttaaccttaatgccatgaacaagctccagaccaagaaaccatggtcactctctttctcatttggacgtgcccttcagcagagcactctcaaggcctgggctggaaaggaggaaaacgtg

SEQ ID NO: 514 - DNA, 376 bp, Gossypium hirsutum
  Clone ID: LIB3493-048-P1-M1-A5
gcttgatccatttccatcccagcagaggcctgaaacagtattaatcgtcgataaaatggaaggacaaggtgaagatgttaggctgggagcaaataagtacagggagaggcagcctataggaacagctgctcaaacccaagataccaaggactacaaggaaccacctgctgcaccactgtttgagcctgccgagttatcctcatggtccttttacagggctggcattgccgaattcgttgccactttcttgtttctttacatcaccgttttaactgtaatgggtgtcgctaaatcttcaaccaagtgttctactgtagggattcagggcattgcttgggcttttgggggcatgatctttgctcttgtctactgcact

SEQ ID NO: 515 - DNA, 307 bp, Gossypium hirsutum
  Clone ID: LIB3493-048-P1-M1-A6
ctggatttgcaaaccattcctttatggggaaccctctgttttcttcctctttttgtctctatacattttagcctaaagggtcattgagttttgcttctagtcggagataaaatgggagcttatatagatttcatggggaaattggaatgggtgaatagttatggcaagaagcaatgcagaagtcttttctggagagcgaaagcagcgatgaaaaaagctttgaagggtaggggcaacaaaaaacagttcaagttccagtatgatccttcaagttatgctcttaaatttgacgatggttattggcatt

SEQ ID NO: 516 - DNA, 392 bp, Gossypium hirsutum
  Clone ID: LIB3493-048-P1-M1-A7
tttctctgcaactgatcccaagaggaatgcaagagactcccatatccctgtcttggcaccacttcccattgggtttgctgtgttcatggttcacttagccactattcccatcaccggaaccggtatcaacccggctcgtagtttgggggctgctgttatcttcaaccaggacaagatatgggatgaccattggatattctgggtaggaccttttattggagctgccattgccgcaatctatcaccagtttatattgagggcatccggtgctaaagctctgggatccttcaggagcagctctgccatgtaaaatctgttgaagcaagaactgtgcagccatgagttcaaaggaaaggctggcatgcttggatgaatgaaatgaagttttcttc

SEQ ID NO: 517 - DNA, 351 bp, Gossypium hirsutum
  Clone ID: LIB3493-048-P1-M1-A8
ggacactacccagatccacagggagatgtgctactccaacttcaatgacatcatccactcaattatcgacatggatgctgatgtgataaccatcgagaactcacgttcagatgaaaagctcctttcagtattccgtgaaggagtgaagtatggtgctggaatcggccctggtgtctatgacatccactctcccagaataccatcaaccgaagagattgctgaccgaattaacaagatgcttgctgtgcttgagacaaacatcttgtgggttaacccagactgtggtctcaagactcgcaagtatgccgaggtgaagcccgccctgaacaacatggttgcagctgccaagct

SEQ ID NO: 518 - DNA, 148 bp, Gossypium hirsutum
  Clone ID: LIB3493-048-P1-M1-A9
tttttcttaaaccccaaccctgggttgctatttcatttgtcatttgatttcaacaaaaagaatggatttttacgaatacccatcccggttttccctctcttcactttctttgtttggtgatttcgtcgaaaaagttaaatatttttgc

SEQ ID NO: 519 - DNA, 388 bp, Gossypium hirsutum
  Clone ID: LIB3493-048-P1-M1-B1
gctatctcccctccttatagaatgctcttcttggttttcttttcccttctacgtctgagcttctgctgttcccctgtttttattatcttttctgttcttttcataccatttggtgggcttttgcccttctatggtgtgttttggttgttaagcctttgacttctagagtctatacaaaatacccatatcctcaaaactctcgaaaaaaaactccatttgtgaatcttcttttctttctttttgggttgtcttgtgaatctccatgccgcataagttattgttggtgatgtttgagattcatgtctccagttgtgagtgaaatcctccgatcggggtttattataaattcctccctcagacgtagaacccatcttgttcagtctttctc

SEQ ID NO: 520 - DNA, 344 bp, Gossypium hirsutum
  Clone ID: LIB3493-048-P1-M1-B10
ctttgatttcgagagtagatcgtcgctcgcttctctctttcgtcgaactccgcgtaataatcgctcatatttctcgcagacgtgaagaatggggctgtctttcacaaagctgttcagccggctttttgccaagaaggagatgcgtatattgatggttggacttgatgctgctggtaaaaccaccattctttacaagctcaagttgggagagattgtcaccacaattccaaccattggtttcaatgtggaaactgtggaatacaagaacatcagctttactggctgggatgttggtggccaggacaagattcgtccattgtggaggcattactttcaaaacacac

SEQ ID NO: 521 - DNA, 286 bp, Gossypium hirsutum
  Clone ID: LIB3493-048-P1-M1-B11
gggaggctaacttttcagataaaggggaacttgccaagttttgaacaggactaagaagaggccacttcaacaatgtttaacccatcaaattattagagaataaagggtatatacaggttgatgagggttagtgccatttctaggtgagatgactgaaatgaaacatacagtaactatttatgtacaaagtcagcaaaagaaagcttgctttttgggtgtaaattagatgattcagttgctgatttcgaagtatcttggatcttcttgataatggtaattccacctt

SEQ ID NO: 522 - DNA, 523 bp, Gossypium hirsutum
  Clone ID: LIB3493-048-P1-M1-B12
ctaaacctccaagcaaaatcccatcaaagacccatttttgaagaatgagcagtggagcagtttcagcaagcaaagcctggattgtggcagccacaatcggagcagttgaggcattgaaagaccaaggcatttgcaggtggaattacaccattaggtcactgcatcaacatgccaagaacaatatcagatcttcttctttcttttcttcttcttcttcttcatcttcttctgctgctgctgctgtttcaaataagttgagggaggaaaagatgaggaaagctgagcagactatgaagaaagttatggatttgaactgttggggtcctaatactgttagattttaatgttctatgcatttggttcatacaaattactacagcttttatcctttttgttagagaaaaaaaatttatggagagagatgatctgaattggtgtaaatcagccttttcaaatttttttcatattatgttggatcttgttgtattggggattatcatatgaaaaaaatttatgaaataca

SEQ ID NO: 523 - DNA, 354 bp, Gossypium hirsutum
  unsure (1)..(354): unsure at all n locations; Clone ID: LIB3493-048-P1-M1-B2
gcagaggaagagcttgaagatgggcgaagatcacagtaatagcggctttttggagactggaaaagctgatagatcggtttggttaatgaagtgtccggtcgttgtggccaaaccatggaagagtcagaccgcttcttcttccgattcacagcctgtcgccaaggttgtcctctctctcgaccctcgcaaacccaatgacccttcttctatgcagtttactatggagatggctggatctgagattggaaatatgccaaagagttacgccttgaatatgtttaaagactttgttcctatgtccgttttctctgaaacaanctcaggtagggttgcaatggaagggaaagttgagca

SEQ ID NO: 524 - DNA, 369 bp, Gossypium hirsutum
  Clone ID: LIB3493-048-P1-M1-B3
tattgagaaaactctctttgtttcaatcccttatttgctaatatgtcgcttcttacagatcttgttaaccttaatctctccgactgcactgacaaaatcattgctgaatacatatggattggtggatctgggatggacctcagaagcaaagcaaggacactttctggtcctgtaagcgacccttcaaagctacccaaatggaattatgacggttccagcacaggtcaagcccctggtgaagatagtgaagtgatcctatatcctcaagctatcttcaaagacccattcaggaggggcaacaatattcttgttatgtgcgatgcttacacaccagctggtgagcccatccccacaaacaaaagatgcaac

SEQ ID NO: 525 - DNA, 390 bp, Gossypium hirsutum
  Clone ID: LIB3493-048-P1-M1-B4
caggcttaaatctgacaaaagacgggtattattcaacataatttcgggtacatcgatgtcatgcccccacgttagtggcattgccgcgctgattaaatcgaagcacaaagattggtccccagcagcaatcaaatctgcactcatgacaactgcatatacattagacaacaaaggaaaaccaatagccgatctcgcgttttacaactcggcatcaccttttgctatcggttcgggtcatgtcgatcccatgaaagctaccgatcccggtttaatatacaacattaccgccgaggattacataagttacttgtgtagcttgcactataccgattctcaagtatccatgttcgaagaaggttatcaatgtacgccgactgaactaaggatgca

SEQ ID NO: 526 - DNA, 373 bp, Gossypium hirsutum
  Clone ID: LIB3493-048-P1-M1-B5
aataatgcagatgtcaactgaggatgcttatcgtatggcaatgaagagcttgttgagatgggtgaccagaaatttggatcgtgagaggactagggtttttttcaccagcatgtctcctactcattcaaagggcgattggggaggtgaggctagtgagaactgttacaatcaaacaacaccaatcgcagattcaaattattggggttctgatagcagggaaagcataatgaaagtgattggggaagaattcagtaaatccgaattccccatcacgtttcttaacatcacacagctctcgagttaccgcaaagatgcgcacacctcgatttacaagaaacaatggaattcattgacgacagagcaactagccaac

SEQ ID NO: 527 - DNA, 596 bp, Gossypium hirsutum
  Clone ID: LIB3493-048-P1-M1-B6
cgaatccagccgagacaggcaccgagttatccacattggtcgagttgatgagtcaatccattgctgttttcgacgacgaatacatgagatcaatccaaggtgaacaagggtttgaagccatcgctgagcacttgaaccagctggagctgttgttttcctttgaaaaacctgatattttcgccttcaccagctggatcaatactgattttcacaaactagatttcggatgggggcaaccttgttcatttgcaatactgggaaaagcagggcctgaatttagaaacttcactgttctcgttgaaaccaaatatgggaaaggaatagaagcttggataaccttagatgaaaccaaaatgtctgcactacaaaaagatcatgaattcctaaactttgctttttcaagtcccaaatttcaagcttgtaagcgtctctggaaacactttgatgatcaataaaatctcctctactatgaataaggtattttcagtagtatatggtttctacttttatatttcgtctttcaggtatttttaagcattgctgttggattgcttatgtggccggattattagttttttttttctttccaatttttt

SEQ ID NO: 528 - DNA, 342 bp, Gossypium hirsutum
  Clone ID: LIB3493-048-P1-M1-B7
gtttcaggtctgggcgtggagcgtggacgagtagttaggggttcatgggttcgtcctgattcacgtggttatgctactcgtgggatgagaggaattagtagccgtgcccgtccacctagtctaaggaggcctgttggactaagagatagacgttctctcatgtgtgcaccagctagtggcagacctttatcacctcccccttctagatcctatgacagaagagcccctgttatgccttatccaaaaggtagctttaagagggaatatagtcaacgtgatgagcttcctcgtccaaggagcaaagaaattatggattatggatctagagttgtccctgataga

SEQ ID NO: 529 - DNA, 382 bp, Gossypium hirsutum
  Clone ID: LIB3493-048-P1-M1-B9
gaaaaaaccctaactccatctgcgacatttacgcaacatgtcattcgatgaagaagagtccttcgaacacaccctcctcgtggtccgcgaagtcactgtctacaaaatcccgcctcgttccacctccggtggttacaaatgcggtgagtggctccaatccgacaagatctggtcgggtcggctccgggtcgtctcttgcaaggaccgatgcgagatccgattggaggatcccaactcggctgagctattcgccgcttgttttatctaccctggccagcgcgagagttccgtagagcccgcgctcgattcttcccggtacttcgtgctcaagattgaggaccggaatgggaaacacgccttcattgggctcgggtttaatgag

SEQ ID NO: 530 - DNA, 344 bp, Gossypium hirsutum
  unsure (1)..(344): unsure at all n locations; Clone ID: LIB3493-048-P1-M1-C1
cggacgcgtgggcggacgcgtggncganaatctcatcaccggtgtcaccaaaggttaccggtacaagatgaggttcgtctacgctcactttccgatcaacgcctccatcactagcggcaacaagtccatcgagatccgtaacttccttggcgagaagaaggtgcgtaaggtggatatgttggaaggggttgccattactcgatccgagaaggtcaaggatgagatcgttttggatggtaatgatattgaactcgtgtctcgttcagcagctttgataaaccagaaatgtcatgtgaagaacaaggatattagaaagtttcttgacggtatctatgttagcgaaa

SEQ ID NO: 531 - DNA, 386 bp, Gossypium hirsutum
  Clone ID: LIB3493-048-P1-M1-C11
cttggtttaaccattgggctggagggcttaacccaagctcagatcaaccaaattcaggctcaattcctcttccaaaacaatcaaccaagctacctttaccaaaatcctcaacttaacgccaaccccaacaccaaccatatgctcagctttcttagtcccaagccagtcccgatgaaacagatgggttctccaccgaaacccaccaagctctacaggggagttaggcaacgtcactggggaaaatgggtcgctgagatccggctacctaagaaccggacacgtctttggttaggcactttcgatacagccgaggaagcagccttggcttatgataaagcagcctataaacttaggggtgattttgcgagactcaactttcctaacct

SEQ ID NO: 532 - DNA, 346 bp, Gossypium hirsutum
  Clone ID: LIB3493-048-P1-M1-C12
aaaaaattgtttttgtttttgaggataaacttacgacatctacaaatggtgacctcggtgctacctagagtagaaagcttggcaagcagtgggattcaatcaatcccgaaagaatatatcaggcctcaagaagagcttacaagcataggtaacgtgtttgaagaagagaaaaaagaggaagggcctcaggttccgaccatcgatttgacagaaatcgagtcggaggacaaagaggtccgggaaagatgtcagcaggagctgaaaaaggctgccatggaatggggtgtgatgcaccttgttaaccatggcatctcccaggagctcatggatcgggttaggaaagttg

SEQ ID NO: 533 - DNA, 360 bp, Gossypium hirsutum
  Clone ID: LIB3493-048-P1-M1-C2
ggaaccacaaagaagatgaagatgtcgagagaaattgcagatgctagcgggaagacattgccagtgcaggaaatcctgaccattgatatcaaacctggttggaaaaagggaacaaagattaccttccctgagaaaggaaacgaacaaccgaacacaatccctgcagatcttgttttcataatagatgaaaaacctcacagcacattcacacgcgatggcaatgacctggttgtcacgcaaaagatatcgctggccgaagcattaacaggctacaccgttcatcttacaacattggatggaaggagcttgaacatccccatcaacagtgtgatccatccaaactatgaggaggtagtcccg

SEQ ID NO: 534 - DNA, 385 bp, Gossypium hirsutum
  Clone ID: LIB3493-048-P1-M1-C3
cggaatgcgatggattgaagtacgaagcgatcgccgccgatctggatggcacgcttttaatctcacgaagctctttcccctacttcatgcttattgccgttgaagcgggaagcctccttcgaggtcttatccttcttctttctctgcctctggtcatcatatcttatctcttcatttccgaagctattggtattcaaatcctcattttcatctccttcgctggactcaagatccgcgacatcgagctggtatctcgcgctgttcttcccagattctatgctgcaaatgtaaggaaggaaagtttcgaggtatttgacagatgcaagaggaaagtagtggtaacggcgaatccgacgttcatggtggagcccgttgtgaaggattt

SEQ ID NO: 535 - DNA, 325 bp, Gossypium hirsutum
  Clone ID: LIB3493-048-P1-M1-C4
ctttccttgttgcttatcttattggtgagttttagaatgctcatcaacatcttttacctgatgtctgacgactcatatctcccacactcattgaaatcctcctttctggagtgatgatcaactctactataaggcgcaggacccatctacttcaatctttctctgttcttttcctttactggttctacgttttttcatgaactctctctctatctttctctctctccttctgattcgaacccaatagcccgcccttattttcttcagcttttcttcaacatttttcatatagaattccatatctgaatttctttgcataataaaa

SEQ ID NO: 536 - DNA, 556 bp, Gossypium hirsutum
  Clone ID: LIB3493-048-P1-M1-C5
gctaaagatagagagatagcaacaatgactagaacggaagccaaaaatactgcagcttttaaggcacagattgagaagctacagcaagaacgagatgaatttcagaggatggtgattggtaatcagcaagtgagaactcaacagatacatgaaatgaaaaagaaggaaaaggagtacataaagttgcaggagaggctgaaccaagtcttaatggaaaagaagaaggaatcaagatcaggaatggaaataatgaatttgcttcagaaagaagggcggcaacgtgggacctggaatgggaagaaagcagacaatgatttctataaaaagattgtggatgcttatgaggcaaaaaatcaagaactgaaagcagaaaatgctgatttaagagcattactgcgctcaatgcaggtagatatgcgtgatttctttaatgctactaatgggttgccaaagcaatctttgcctgttagcgaaagacatgaaaatgatccatcacaatcgccatttggtgggagggacgatgtctttgatcttccttttcacatggctagggatc

SEQ ID NO: 537 - DNA, 333 bp, Gossypium hirsutum
  Clone ID: LIB3493-048-P1-M1-C6
actcattgatgaagaaaatgatcattgacagaattgctccggtaagacgagtttatttatacatggaagtgctgaggtagaagtatgtacgacattatcccaatagaaaatactgttctattattgagcctaaatgaccaaaacccaagtgcaattttcctgtaaaaatcgaattactgtgttttcacaggaattgaattacgatgcttaaaatttggaataaaattttggtgttgatagccaactgtttgcgactgacttgactagttgcaagtgtgaggatatcatatatgacaccggcaatttaatgtcagtgtcagcaggatgtagatg

SEQ ID NO: 538 - DNA, 385 bp, Gossypium hirsutum
  Clone ID: LIB3493-048-P1-M1-C7
aaaatccccatgcgccgctcctgggtcgggctaatcggaagctctacgaacgatcgtctggctccgattacggcggagtaaacgatgttcgagtaacaggtaaacttttagccctcgattttcttgctttgattttatctgaaaaagagaaaagaaaatccaggaaaaagagtctgaaatcacctttccaatttttgatctttttttctctgaaatttttctgtttttctattcaatatccgtcaaaaagatccgtttacaatgtttgtattggctctttatagccaaaataataataaaaataagataaaatgaaaaatctgaaatacaatctgttgtccttttttcttgttatttcgtttttcttttggttggttgtgagttt

SEQ ID NO: 539 - DNA, 386 bp, Gossypium hirsutum
  Clone ID: LIB3493-048-P1-M1-C8
agttagtgtagggaagctgaacggttagattcttcaaatgatcagctaagctcttgtatgagctctgtgttggatgaagtctcactagaagcatctagtttttggcagcttcaacaagtcatggaaaagttggatatccggacaaaattgtgcatacgggatagtttgtatcgtttggctaggagtgctgaacaaaggcataattgcacaaatacgaaaggtggcatgaaagaggaaaaagatgaagctggttcatttgtggccaatgagacaaacaagtgcacgcgatttatggatatggaaactggcacaaactctatagatagatccatagcacacttgttatttcacaggccttcaggtccatctctaaaccatactaccga

SEQ ID NO: 540 - DNA, 385 bp, Gossypium hirsutum
  Clone ID: LIB3493-048-P1-M1-C9
cccacgcgtccgcaaaacctggggttgttttcttcttctaatcaatggcatcttccatagctacaactctcacttcctcttcaaagctttgcaggaacacttctctcttcgagtcttccttccatggggttccaattaaaccactttcttttcatttcaaaacaaagtcttccccgtgcaacgcatccatttccatgtctgcagcatcacctccaccctatgatctgaataatttcaggtttgaccccatcaaggagtccatcgtctcacgtgagatgacacgcaggtacatgatggacatgatcacctatgctgataccgatgtggtggtcgtcggtgccggctccgccgggctctcttgtgcctatgagcttagcaagaaccc

SEQ ID NO: 541 - DNA, 388 bp, Gossypium hirsutum
  Clone ID: LIB3493-048-P1-M1-D1
catttttgaagagcaaagatgctggtgatggatctgagcaggctttgcttaatgaactcaaggcattggatgaacatcttaaggcacatggcccattcattgctggggaaaagataagtgcagttgatttagctttgggaccaaaactttaccatcttgaggttgctctgggccatttcaagaaatggactgttccggaaagcttgactaatgtccgcaattacatgaagtcgatattcactcgtgaatcgttcgtgaaaacgcgggctgctaaggaatacgtgatcgccgggtgggcacctaaggtgaatgcatgaacaaactggaaacaatgaggtgtttgaagcgtatgagttatgtaataaaatgtgagggatggtgatttaat

SEQ ID NO: 542 - DNA, 552 bp, Gossypium hirsutum
  Clone ID: LIB3493-048-P1-M1-D10
atcatcagttcttcccatctgcctgctcgagtcttggtttagggtttccggagtttacttcgtatccagtccttgacatggcgggtgctggaatccacccttatcaccagcaatggcctccggtaccagctcctccgccccctccagcagcagcatcagctgcgcctccaccgcctactgtccaccatcctcctccacctgctccttctcatgacgaggttcggactatcttcattatgggtcttcctgaagatgtcaaagagagagagctgcagaatttactcagatggcttccaggttatgaagcttcacaagtgaactacaagggagaaaagcctatgggttttgctctcttctcaagtgcacgacttgcaggtgctgccaaagatgcccttcaggaaatggttttttgatgctgagtcaaagtcccttttgcatgtagagatggccaagaagaatctatttgttaaaagaggaatagtaacagattctgacgcatatgatcaaaccaaacgattgcgaactggtgggattattcacacagtccttaca

SEQ ID NO: 543 - DNA, 574 bp, Gossypium hirsutum
  unsure (1)..(574): unsure at all n locations; Clone ID: LIB3493-048-P1-M1-D11
cttggtcctttttgaggctaatggattggctgttctctcagaagttctgtcagccatttttgctgaagttatgcaagggaaacctgaatttacagaccatttgactcacaaattgaagcatcatccaggtcagattgaagctgctgcaattatggaacatattttggatggtagctcttacattaaagcggcacaaaaattgcatgaactggatcctttgcagaagccaaagcaagaccgatatgctcttcgaacttcacctcaatggctcggtcctcagatcgaaacgatcaggtttgcaaccaaaatgatcgaaagagagatcaattcagtaaacgacaatcccttgattgatgtctcaagagataaggccttacatggagggaacttccaaggtactncaattggcgtatcaatggacaacactcgtttagctattgctgcaattggcaaactactgtttgctcaattctctgagcttgttaatgattactacaacaatgggttaccttcgaacttgtcagcaagcccgaacccgagcctcgattatggtttcaagggggcggaaatcgcg

SEQ ID NO: 544 - DNA, 366 bp, Gossypium hirsutum
  Clone ID: LIB3493-048-P1-M1-D12
cccacgcgtccgcctacttggtgtcaactctcaaacccagaaagctcaaaggaaaaaaagatggctttggagatctgtgtcaaggctgctgttggtgcccctaatgttcttggagactgtccattctcccagagagctcttcttactttggaggaaaagaagatttcctacaaaatgcaccttatcaatatcagtgacaaacctcaatggtttttggagataagtccagaagggaaagtaccagtggtgaagtttgatgacaaatgggtggctgattctgatgtaattgttggaatccttgaagaaaaataccctcagccttgtctcaaaacccctcctcaatttgcctctgttggatcaaacata

SEQ ID NO: 545 - DNA, 479 bp, Gossypium hirsutum
  Clone ID: LIB3493-048-P1-M1-D2
cggacgcgtgggcgagactgttgcgtagacgatgaaattgctgctgacctcaaagagcatgttatcaagcctgtcatccctgaaaagcacctcgatgagaagacaatcttccaccttaacccatctggtcggtttgtcattggtggccctcacggtgatgctggtcttactggacgtaagatcatcattgacacttatggtggctggggagcccacggtggtggtgcattttccggaaaagatcctaccaaggttgacaggagtggtgcttacattgttaggcaggctgctaagagcattgtagcaaatggccttgcccgaaggtgcctcgtgcaagtctcctatgcaattggtgtgtccgagcccttgtctgtcttcgttgacagctaccgaactggaaagaattccagacaagggaaattctccaaattgtgaagggagaacttcgactttaggcctggcatgatcacaaacaacct

SEQ ID NO: 546 - DNA, 350 bp, Gossypium hirsutum
  Clone ID: LIB3493-048-P1-M1-D3
gaaatatcctgagataacttacgaggaagtagtcattgacaattgctgtatgatgcttgtgaagaatccggcactttttgatgtattggtgatgcctaacctctatggtgacattatcagtgatctttgcgctggattgattgggggcttgggcttaacacctagttgcaatattggtgagggaggaatagcacttgctgaggctgtccatggttcggcacctgatatctctggaaagaatatggcaaatccaactgccttactattgagttcggtctcaatgttgcgccacttaaatctccatgacacggctgttaggattcaggaagccattctcagcacaatctcag

SEQ ID NO: 547 - DNA, 530 bp, Gossypium hirsutum
  Clone ID: LIB3493-048-P1-M1-D4
caacttttcatttcttctttcagggagtctggagcttttggccaaaaactctccactgtttggtgaaccgaatctgggattcctccaatcaggtaaaagctttctcttctcttaagggcttcatttgctataacatgagcgtagacatgctttgccttaggaataaaatgaaagtcgatctcttggaatctgtcttttttgctttgtatgtctctgataattgctccaatgaccgatttgtctgtatcaatactttggcatttcttaatgatagttttcgaatctcccactacttctattttgtttaaccccatagaaatccctaattttattgcctgtaatattgcatatacttctgccgtgaacggagttgctatctcggagtgcatgactgccttcggtgcgaggatcttccccctcctcgttccgtacgagcaaacctgtagtcgatctggacgatagtcggttgaaggctgcgtcaaaataaactgtgatccttccccttctacatatttgttgagtattttcag

SEQ ID NO: 548 - DNA, 260 bp, Gossypium hirsutum
  unsure (1)..(260): unsure at all n locations; Clone ID: LIB3493-048-P1-M1-D5
ttcctttttgtcccttgtttattgnagtatttccccctcatggccgccgctgatgtcgagttccggtgcttcgtctgagggctcgcatgggccaccgacacaccgggccctcgaagaagccttcagtgcgtttggtgaaatcgtcgaatcgaagatcattaatgatcgtgagactggaagatcccgaggcttcggattcactactttccgtgacgagaaagctatgaaggacgcgaactaaggaatgaactgtccaaatc

SEQ ID NO: 549 - DNA, 534 bp, Gossypium hirsutum
  Clone ID: LIB3493-048-P1-M1-D6
ataaccttgagattatcaatttggaggcttcttcgaatttcctcattcaagatgcaaattttcgtcaagaccctcaccggaaagaccatcacattggaggtggagagttctgatactattgacaatgtaaaggccaagattcaggacaaggaaggcatccccccagaccagcaaaggttgatcttcgctggtaagcaacttgaggatggccgcacgttggctgattacaacatccagaaggagtccacactccacttagtgcttcgcctccgtggaggaatgcaaatttttgttaagactttgactgggaagaccattacattggaggtagagagttcagataccattgataatgttaaggcaaaaattcaggacaaggagggaattcccccagaccaacagaggctgatttttgctggtaagcaactggaggatggccgtaccctggctgactataacatccagaaggagtccaccctccacttggtgctccgtcttcgtggtggtatgcagatttttgtgaagacacttact

SEQ ID NO: 550 - DNA, 498 bp, Gossypium hirsutum
  Clone ID: LIB3493-048-P1-M1-D7
gatggcacttatcaaagaaggtggatcactgaagcatattctagatgaaatagagactggtggtcctgcagcaatgatgaagtactggaatgataaagatgttctgaagaagttgggtgaagcaatgggtcttgcagtttcaggggatgcagccacttctgccgacaactctgcagcagatgaaggtgatgaagtaggaaatgaggatgaatcgattgtacacaattgtgctagtgttggtgatgttgagggtctgaaagctgcactagcctctgatgcagacaaggatgaagaagattcagagggaagaacagcattgcattttgcatgtggatatggcgaggtgaaatgtgcccaagtccttattgaagctggagcaaaagtggatgctttggacaggaataggatacttgacttcattatgcacctggttatggaaggaaagactgtgtggcccttttacttgagaacggtgctgctgtcacactccaaaacatg

SEQ ID NO: 551 - DNA, 487 bp, Gossypium hirsutum
  unsure (1)..(487): unsure at all n locations; Clone ID: LIB3493-048-P1-M1-D8
gaggacgttatcttcaactggccagactacaattgagattgattctctgtacgaggggattgatttctacacgacaattactcgagctcgatttgaggagttgaatatggatctgtttaggaaatgtatggagccggtagagaaatgcttgagagatgctaagatggacaaaagcaatgttcatgatgtggttcttgttggtgggtctactaggatcccaaaagttcagcaattgttgcaagacttcttcaacggtaaagagctctgtaagagcattaaccccgatgaagctgttgcttatggagctgctgtgcaagctgcaattttgagcggcgagggcaatgagaaggttcaagatttgctgcttttggatgtcaccccactttcccttggntttgaaactgccggtggtggtcatgactggcttgattccaagaaataccacaatcccaaccaaaaaggaacaagttttctccacctactctga

SEQ ID NO: 552 - DNA, 388 bp, Gossypium hirsutum
  Clone ID: LIB3493-048-P1-M1-D9
atcaagctgatggcaactcagacaatactcacaatgtttgctcttctaatggcagcacaattcaaatcaatatcttcaacgaaccttccaccaaaggatgatcaagatctccgtcttgccatggaagagatgcaaaaagccaattacttcacctttgtaatgttgctcaacatgttgcccctcgacccaaagttccttgctaacgtaacttttttaatgcccaatgatcggatgttgtcaaaaacggtaatcccagataacgcgttttccagcttcttgcatcgtcattcaatcccttcaccgttgattttcgagcatcttttatatatcccgacgggttcggttcttcccagtttaatgccggagtacttgatgaatgtctcgaatg

SEQ ID NO: 553 - DNA, 390 bp, Gossypium hirsutum
  Clone ID: LIB3493-048-P1-M1-E1
attgacaacatattatcgaaaccagttatccccactgacttatatagagcaactcgagatcctcagcttgtaagattgtcagcttactcaaaagagggccttactgtcattgctataggtgtacatctcaacacatatgacaaagcatctgtgaattactatgtacagtcacacattcacatgaatgaataccgagaccgtgtagtattgcctactgccactgagaagtatggacggcatatcagcacttgtctgacggtttcggatatgactggctagaagcttacagcattgcatcaaataaagatactgaccactatatcaacaatcgatgactcgaattatcctgagaagacacagacatattatattgtcaatgcgccatatata

SEQ ID NO: 554 - DNA, 383 bp, Gossypium hirsutum
  Clone ID: LIB3493-048-P1-M1-E10
gaaggtagccaaagaattggagcaagttgtggaggaatggctacaagagcacaaagaaaagagagctgaaaatgaggcaaacagtgaggaagatttcatgggagtgatgctatctattcttcgtgatgcagaggagcacgatgccgataccatcaacaaagccgtcagtctcgcacttatcttagccgccgaagatactacatcaattacaatgacatgggctttatctttattactcaataatcgcgatgcattgaacaaggtcaaacaagaactagacatccatgttggtaaagatagactcttaattacagaatcagatactaaaaacttagtgtaccttcaatctgtcattaaagaaacattacgcctctatcctgctg

SEQ ID NO: 555 - DNA, 388 bp, Gossypium hirsutum
  Clone ID: LIB3493-048-P1-M1-E11
cggacgcgtgggttcagacgggcggtactaccacctgctgtgctatccacatgcctcctccgccggcgcgtgttggacctgtggccaccgggatcaagatcttccggaccgaaggcgtcgctgctcttttttctggcgtctctgctaccgtcctccgccagaccctctattccaccacccgcatgggactctacgacatcctaaaacagaagtggactgataaagagaccaaaacaatgcctctctcgcggaaaatcaccgccgggctaatcgccggggggatcggcgctgccgttgggaacccagccgacgtggcgatggtgcgaatgcaagctgacggacgcctccccgtatcttaacgtcgtaactataccagcgttgtcgacgc

SEQ ID NO: 556 - DNA, 383 bp, Gossypium hirsutum
  Clone ID: LIB3493-048-P1-M1-E12
cggacgcgtgggctgtcactgtgtttggcatcaaaaaccctgaggaaattccatggggtgaggctggtgctgaatatgttgttgagtctaccggtgtcttcactgacaaggacaaagctgctgctcacttgaagggtggtgcaaagaaagtgattatttctgctcccagtaaggacgcccccatgtttgttgttggtgtaaatgagaaggaatacaagcctgatcttgacattgtctccaatgctagctgcacaaccaactgccttgctccgttggctaaggtcatccacgacaaattcggtattgttgagggtcttatgaccactgtccattcaattactgctacccaaaagactgtggatggtccatcaatgaaggactgg

SEQ ID NO: 557 - DNA, 291 bp, Gossypium hirsutum
  unsure (1)..(291): unsure at all n locations; Clone ID: LIB3493-048-P1-M1-E2
cggacgcgtgggcggacgcgtgnnagctcacatatatggcaggcgcagcaaattgggtttccataaccttactgttttcagtatgtttatcggcgtcctatggtaagaggaccggaatctccaccatttctgacggagccgatgggtttcaaccaagcaacggttttccgcatgaagctgatcctgattcttcaacctctatcgatcctgatcctaccggattcggtgctgggataggtataggttatgaaagaagcggttactgtatttactgccacaatatatatatca

SEQ ID NO: 558 - DNA, 311 bp, Gossypium hirsutum
  Clone ID: LIB3493-048-P1-M1-E3
acctcctctgacgcattgtcggagtctttcagttctttttcaaaagagtccaactttttaatcaattaaaaagttagagtacataagacttattatcgtagagtctcttcctttatatcctcaacctccatttcttatcagacgtgcacttcaagaagttgtattaccaggtggttacaaaggtgacaaagatggctacaccattcctgctgggactgacatcttcatttctgtatataatcttcatagatctccatatttttgggaccacccccatgattttgttccatagaggtttcaggtacaaaatg

SEQ ID NO: 559 - DNA, 218 bp, Gossypium hirsutum
  Clone ID: LIB3493-048-P1-M1-E4
cccttccccacccccccaaaacgggtcttttgaaaacgccatgaccgccatagctgctgctgttgctttatccttgccaatctctttatgcgattcatgcaaggtttctaaaaagtttcagggcgttaaaggagggtttggggtgtttgcagtgttgggggaggcaaatagcttggggccaagcgataagaagagcctctggggcacgttgtttgatg

SEQ ID NO: 560 - DNA, 539 bp, Gossypium hirsutum
  Clone ID: LIB3493-048-P1-M1-E5
gcacgccagctgcctttgacttgcgggcttaccttgatgggtgcctacagagaggaacttgactataccgtgctgtccaacttgattagtataacatacaaggttgggaggattgcagctgatgcaagacctgagctaatggacaacatcaatcaatttttcattaacattttccaatattctgctgagaagctcggttgggatgctacacaaggtgagagtcatctggattcaatgttgagaggagaaattttgactgcgcttgctatgcttggacacaaggagacattgagtgaagcaagcagacgatttgatgcattcttgaaagacagaaacacaccactccttcccccagacacaagaaaggcagcatatgtagctgtaatgcaaacagtaaccttctcaaataaactggttataactcttttttgaaaatttatagagagactgatttaagccatgagaaaattcccattttagggtcattgccatcttggtcccgatcaggggtataatttctgtaaagttctaaaagtttt

SEQ ID NO: 561 - DNA, 473 bp, Gossypium hirsutum
  Clone ID: LIB3493-048-P1-M1-E6
aacatcagcgaagaagaaaacaaggggctaaccctaacacgtagaagatgaagaagatggtgaacttgaagaatgggagatcgcaggtgaaggagatgatacggcgtcgtcttcgttaaagaaagttgtcgtcgaacagcctcaaccgttggagcattcatggaccttttggtttgatgaccctcgtgctaaatcaaaaaaagctacttggggtagttctaggctccctatttacactttctccaccatcgaacaattctggagtctttacaataacatagatcatccaagcaaattggctgtgggagcggacttccattgtttcaaatataaaatcgagcccaagtgggaagaccctgtctgtgctaacggaggcaagtggactgtatttttaaaaagggggaaatcagatatggcttggttgtccaccgtgctggctttgataggggaagaggtttggtacagcgatgaaa

SEQ ID NO: 562 - DNA, 429 bp, Gossypium hirsutum
  Clone ID: LIB3493-048-P1-M1-E7
ctgcacgctacccctcacatgtaattccctgcggtccgcacccactgcctacgctggcataacacgcgaaactgtgcggtctccacttactgatctatagcaactccatatattgagcttgtatcattgtctctaactcaaaagagcatcttcctgtcatcgctatagatgtacatctcaacacatatgacaaaccatacttgaattactatgtacagtcacacattcaaatgaatgaataccgagaccgtgtagtattgcctactgccactgagaactatggacggcatatcatcacttgtctgacggttttctatatgactggcttgaagctttcagcattgcatcaaataaagatactgaccactatatcaacaatcgattactctaattatcctgagaagacacagacatattatattgtcaatg

SEQ ID NO: 563 - DNA, 528 bp, Gossypium hirsutum
  Clone ID: LIB3493-048-P1-M1-E8
cggacgcgtgggttgatttttgcgtttcccagacttaaaagcttcggtttttattttcactttgaaaaacgaaaatggataagattaagagtatgatgcgcgctgttcagtacagtaaatatggcggaggagtcgccgatctcaagcatgttgaagttccggttcccagtccaaaaaaggatgaagttttgatcaaagtagagacagctagtattaacccaatcgactggaaactacaggatggggtagctcggccatttttacctcggaaattcccccacattcctggtaccgatgtagcaggagaagtcgtacaagttggatcagaagtccagagtttcaaagttggggagaacgttgttgccgtacttggtaatggaggtgcactagctgaatatgctgtgggctaatgaaggttccacagtttcaaggcctccagaggtatcagcccgtgaagctgcagctttgccaattgctggcctcgcagctcaccagtcactcacccagcttgctgggatcaaactcgat

SEQ ID NO: 564 - DNA, 194 bp, Gossypium hirsutum
  Clone ID: LIB3493-048-P1-M1-E9
attattattgtaactttgtgtgttaattaggatgcactataacaaactccatctgtgtgagctataatgtgcatctttctttgaacaatttaatttgtttttaagggattaatattttgttttgcttatttattacttataattattcctttctttacattgaagaattacgataatgaagagagattttgtgt

SEQ ID NO: 565 - DNA, 541 bp, Gossypium hirsutum
  Clone ID: LIB3493-048-P1-M1-F1
cgagaagttgctgaatcacaaaagtgaacagaggaaaataaagaggcatctgctgcagctggtctacttgagaagttgagtgttgaggaaaaggaagccaaggataaagtggaagagaaggatgttaaagcaaaggaagaaatggaaacaaaggaggatacaaaaaaagtagatgatagtgagaagaaagatggggagccagcatcaacttaaaaaaaggggttgggttgtgtttgttttctgtgccatatgctttttgggatatatggtgagattagtcacctcccatgtcttgcatattcatctcctgcagaggaaactagatgggtcagtatgtttataagctggaatggtttgagttcctttgcgtgtcattaggtgtgagtgttgaggtttgttcaaacaccgaatcatgtttacatacattgcatgttgttgagagtttttttcgcggttttgagtattgtgagggagagttgcattcaaccgggtttttcccagtattattattatctccaaattgtctaaattgcttattatt

SEQ ID NO: 566 - DNA, 505 bp, Gossypium hirsutum
  Clone ID: LIB3493-048-P1-M1-F10
ttcactttcagattccaccgggggtcctcattctgcttgtcttccctatggccgcaccttctttcaccatcccaccggtcggttctgcgatggccgcttggttatagatttcctcgctgaagctttgggattttcctttttaccaccattttatggatctcaaagtggaaaatgggagaaattccaaaagggagcgaattttgcagtggctagtgctactgcactgaattcgtcgtttcttgctgaacaaggaatccatagtgtctccaccaacatttctttgggagttgaagtgaattccttcaaacatttattgccatctctttgctcatcttcttcatattgcaaagagctcctaaggaactccttgattgtgatgggagagattggaggaaatgactacaatcatgccttcatgcaggggaaacacgttgagaatatccgaaaacttgtccctctggttgttgatatcatatcttcatcaatcaatgagttgatcgagtta

SEQ ID NO: 567 - DNA, 494 bp, Gossypium hirsutum
  unsure (1)..(494): unsure at all n locations; Clone ID: LIB3493-048-P1-M1-F11
cgcatctttgtttgttcattgagggatagtatagttttcttagaaaagccagagtgaaagaaagaaaaaaagtaaaagaaaaatggctttggcaagcttggtgagaagaaaggcataccttttgtctagaaacctgtcgaattcgcccgcagatgcgttgaaatactctttttcactcagcaatttctcgaggggtttcgcttcaggatctgaagagaacgacgtcgtcgtcatcggcggcggacccggcggctacgtggcagctatcaaggctgcacagctaggtctcaagacaacctgtatcgagaagcgtggtaccctcggtggtacttgccttaacgttggttgcatcccatctaaggcgcttcttcattcatcccacatgtaccatgaaactacgcattcatttgctggccatggtgtgaaaatctcctctngtgagaatgatttgcctgccatgatggcccagaaggacaaagctgtttctaatctta

SEQ ID NO: 568 - DNA, 362 bp, Gossypium hirsutum
  Clone ID: LIB3493-048-P1-M1-F12
ttgattttgggctaaaacaagggatgcaatggccagctttaatgcaagcacttgcattaagacccggtggaccaccggcgtttcgattgaccggaattggaccacctcaaccggatgatactgatgcgttgcaacaagtggggtggaagctagctgaattggccgaacgcatcgggatcgaattcgagtttcggggattcgtggctaatagtttagccgatctcgaacccgaaatgctcgatattcgtcctcccgagattgaagtagtagcggtgaacgctgttttcgagcttcatcccttgttagctcgaccgggtgggatcgaaaaaagttgttcctctattaaagcgatgaaacccaag

SEQ ID NO: 569 - DNA, 530 bp, Gossypium hirsutum
  Clone ID: LIB3493-048-P1-M1-F2
tgtcaatgctgtaattgatggggacgacataatatatagagattacattgatatcagtattgctgttggtactccaaaggtctgtcagtttctctcactctatgtaaagtgatttggcaatgtagttatcagacgccatttattccttcaaaattccatttattccttcaaaattccatctgaagataatatctagcttctttggggcatctgaagcctttaaatgtggtaaaagaaatacttgtttaaggaatcgattattgtgatagctgaattctatacaaactaataagaactttgagtttgtagattcatggtttacttagcactcaccttaaaggtcaaactggggctagattgcttgaggttgtaatatatgcattgggatcattcactttcattctaaattgatatgccattgctaattgatgccattttgtgcttgtgttttcagataaaaatagtagctagattccaaagtacaccattttctgttatttacgtctgtatgtactaatgcaaatgtgatt

SEQ ID NO: 570 - DNA, 538 bp, Gossypium hirsutum
  Clone ID: LIB3493-048-P1-M1-F3
cggacgcgtgggggaaaaagcttgtgggtctatctctgaaatcagcttggaggttgataggcttggtaatcaggtgtctacttttgaatctataattactaaaggtgggaaagtagcagagaaagatgtgcttaatttgattgaacagttaatgaatcaattgcttaagttggatggtattatggctgatggtgatgtcaaattgcaaagaaaaatgcaggtgagaagagttcaaaaatatgttgaaacattggatatgttgaagattaaaaacgccatgcctagtaccaatggagctcaatccgaaacacagaatcgacataagcatagtgttcgaaaacaagagcagcaatccaggcaaagattagcaccaatccaagagcaacaatcgagccactcggtttctcaattgcccaatcatcaacaataccagcacaagcatcagcaccagcaggcatctggtccggtcgtagttactacgaaatgggaaacattcgattcatccccggcaacattgccgggcacctcgacatctaca

SEQ ID NO: 571 - DNA, 178 bp, Gossypium hirsutum
  Clone ID: LIB3493-048-P1-M1-F4
attcttcacaaaaaagaaaagaaggggacagtgaaaatggcaacccttaaagttccagctcatgtacctgccccttctgaggatgctgagcaacttcgtaaagcttttgaaggatggggtacaaatgagccattgattattgacattttggcttacaagaatgcgccttaacgccatt

SEQ ID NO: 572 - DNA, 512 bp, Gossypium hirsutum
  unsure (1)..(512): unsure at all n locations; Clone ID: LIB3493-048-P1-M1-F6
gattccttcatttaatcgcatttgtgtgtgagaaaataatccctccttctaaaaccaactctgggatcttgcttcctgagaagacccccaagttgaactctggaaaagtggtagcagttggaccaggagctcaagacagagatgggaagcatatcccagttaatctgaaggaaggagatacagttcttttgcctgaatatggtggcactgaagtcaagcttggtgaaaaagagtatcacctatacagagatgatgacatcttgggaacccttcatgactgatttttgcggctgtgggactggagaatttgattctcattcaaatatgtctctgttcttgaaggaaacaaatatntaccttggacttgtgactctatcagtnnatttacatgtttaagactttttattggtttgaaggcattttggatgaggaatgttttcaagaattttactagctatgaggaaaaaatgttgctaaaatctttaatcaataatctcttgccttttgggttt

SEQ ID NO: 573 - DNA, 583 bp, Gossypium hirsutum
  unsure (1)..(583): unsure at all n locations; Clone ID: LIB3493-048-P1-M1-F7
cacagctccatgattttgtgacgagaaatagcaagctaaaacaactcggaaagcctatggtccctaatctcgaccaaggcttgtggcgatactcgcgtcatccgaactatttcggcgagcaattgtggtggtggggactggtcgtattcgcttggaacttgggacatggatggacctttgttggagctttgattaatagcatgtgcttagcttacgttaccgtgctcgtcgagcggcggatgttgaaacaagagtaccgagctgaagcatacaggttatatcaaaagacaacctcagcatgtgtaccttggttcaaatcttctgttatagcagtaaaagataaggatacttgatctaaattttttgtttccttgccatgttttttgtcatggtggtggattctatacctattatgtccctggctttgatgtggngagcacttgggatgtattctgctatgtctctatttgagctcaaaatgggtgccgtctttggtaatcaaagagatatcactgtatgaaatcatgtaaaattctttggttgtttatttgcaatagaatttttttcttcaatttttctggat

SEQ ID NO: 574 - DNA, 529 bp, Gossypium hirsutum
  Clone ID: LIB3493-048-P1-M1-F8
caaaaaccgtccctgcaaggttggtgaagtttcgacctgcaagactgggaagcatggtcatgctaagtgtcactttgttggaattgacatcttcactgccaagaagctggaagatattgttccctcttcccacaactgtgatgttccacatgttaatcgtactgactaccagttgatcgacatttctgaggatggatttgtgagtttgctgaccgacagtggagacactaaggatgatctgaggctcccaactgatgagaacctgttgaaacagatcaaggatggttttgctgaggggaaagacctggttgtgtctgttatgtctgcaatgggggaagagcagatctgtgctctcaaagacattggtcctaagtagtttcaaatttaagtagtttcaaattcatttatttgcaaatcttagatggaaccataaaagactttggtagttctaaatgcggttttgatgttttatttgggtttggatagaaaaaagagaataacaatataactagtttcttgttgtgctttt

SEQ ID NO: 575 - DNA, 561 bp, Gossypium hirsutum
  Clone ID: LIB3493-048-P1-M1-F9
caaatatatccacattttttattgaatgaagggtatatgatagttttacaactaaacaggaaacacttttttaatggaaatgaagtataattaacctgaacctacaggactttgtggaaggaactccaaattagagtaccatgtttatgttactactgtgattaagctaattttttggtgaaaaaaatggaacaaagagttacattacacttataagagccatgctttgccttgaccaagttttctttggttatggttttcttggattgtcactatgaactatgttgatgtggaaaatccattaattattttatggagtatatttacagttctctaatccttgttgcttctttttgtagattgcttcacaaatggggcttttctctttggtctttaatgttcaagttcctgctcaacacactatagtatggtattttattttgtgacgaaggaactagtacctggttcccttttgcatcgatttgttgatggtgatgatgaattccgcaatagtagactgaagcttattccatcagtaccaaaaggatcatggattgtgcg

SEQ ID NO: 576 - DNA, 367 bp, Gossypium hirsutum
  Clone ID: LIB3493-048-P1-M1-G1
cggacgcgtggggaaatatggagagcgtgttttggcttgcggaggagaagctgtaaattctgttgatgatttaaccccagcttgtcttggctgggcgggacttgtctacgagcatgtccttggggaagataagtatacatttgtggaaaatgtgaggcatccccattcatgtacaattttgatcaaagggcctaatgaccacacaattgcccaaattaaggatgctgttcgtgatgggctgcgggctgttaagaatactattgaagatgaggcagttatattaggtgcgggagctttcgaagttgcagctagacaacacctaattaacgaagtaaagaaaactgttcaagggcgtgcccaattaggt

SEQ ID NO: 577 - DNA, 353 bp, Gossypium hirsutum
  Clone ID: LIB3493-048-P1-M1-G10
gaaattgtcgttcatgtcctggtggagaacccaaaccctgttccaatccccctcgtcgacattgactacctcattgaaagtgatggtagaaaactcctttcaggcttgattccagatgcttgatccatccatgctcatggtgaggagactgtcaaaataccagttactttgatatatgatgatatcaaaagtacatatgatgacattaagcctggcagcatcattccatataggctgaaagttgatctcattgttgatgttcctgtttttgggaggttaactatacctcttgagacaactggagagatccctataccttacaagccagatatcgatatggagaatatccactt

SEQ ID NO: 578 - DNA, 432 bp, Gossypium hirsutum
  Clone ID: LIB3493-048-P1-M1-G11
gactcactataaagaaagctggtgcgcctacacatacccctccttaattccctggtccacccactcttccgaaatatattcataaccattatgactttcttactaaacgtggtccatttcattcttatacaacacttaccacctttcaacttccacaacattccaaacatcgttaactcgttacccaatctactttttttctactctctcacatcaccatcctaaccttctcaacttctaacttaactaaaactcatcacccattatattctaactatctacactttacaacactatctcttaaacctcttcttataatctatctcttcattccactgtctataaacacttgactcctactttaagtactacctatctcaataatctaccatccttccatcactgctataagatcatctctaactatcacac

SEQ ID NO: 579 - DNA, 350 bp, Gossypium hirsutum
  Clone ID: LIB3493-048-P1-M1-G12
gttccggtatacaaaaaagagtggtcctccgaatacaatctacaaaccccctccagttcctgtatacaacaaaccactacctcccccggttccagtgtatacgaagccactttcaccacctttttcaacctacaaaccaaaacccctccctcccattccttacaagccactccctccacttcccaagatccctccattccctaagaagccatgccctccccttcctaagctaccttctcttcccaagattcctcccaagtattttcaccaccaccctcccctttctaagctacctcctctccctaagattcctcccaagtatttccaccaccatcccaagttcggaaaat

SEQ ID NO: 580 - DNA, 362 bp, Gossypium hirsutum
  Clone ID: LIB3493-048-P1-M1-G2
aaaaaaccgcttcaggcaagccctggggtgatgttttgaaggagaggtggtgtcctccctggcatcaaggtcgacaagggtaccgttgagcttaacggaaccaatggcgaaactttcacccagggtctatatggccttgcacagcgatgccagaagtactatgaagctggtgcccgctttgctaaatggcgtgctgtccttaagattagtgctaatgagccaaccgagcttgcaatccaagaaaatgccaacgggctagctatgtatgctgccatctgccagcaatgtggccttgtccccattgttgagcctgaaattcttgttgacggatcacatgacattaaaaagtgtgctgcggtgac

SEQ ID NO: 581 - DNA, 501 bp, Gossypium hirsutum
  Clone ID: LIB3493-048-P1-M1-G3
cggacgcgtgggctttactcaagtggcggaggtgcatacttatttgtaccccatggtgaagctgtgcctataagtcaatctggtgggcatctggttatctctgagggtcccttgatgcacgaggtgtactcttatccgaagactgcatgggagaatactccgatctcccatagtactcgtatttataatggaggaaatacgatccaggagtttctgattgagaaggaatatcatgttgagcttctcggcaacagttttattgacaaagaattaattgttagatataagacagatattgacaacaaaagaattttctacaccgacttgaatggctttcagatgagtcggagagaaacatatcataagattccgttgcaggggaattactaccccatggcttctcttgctttcatgcaggggtccaatggccataggttttctgtccattctcggcagtcactgggtgcagcaagctgtaaacaggggtggctagagattatg

SEQ ID NO: 582 - DNA, 363 bp, Gossypium hirsutum
  Clone ID: LIB3493-048-P1-M1-G4
gaagcctccgtttacgctcggtgggaggaagcaagccattgcgccccactgttttcgccgctccctccttcgatccttctcctacgtggtccatgacctatgcttagcctctctcttttactacattgcaacatcatattttcactttctcccacaacccttttcctacattgcttggcctgtctattgggttctccaaggttgcatcctcaccggtgtttgggtcatcgcacacgagtgcggtcaccacgctttcagtgactaccaatgggttgacgacaccgtcgggttgatccttcattccgcccttttagtcccgtacttctcgtggaaaatcagtcaccgccgtcaccactcgaacac

SEQ ID NO: 583 - DNA, 382 bp, Gossypium hirsutum
  unsure (1)..(382): unsure at all n locations; Clone ID: LIB3493-048-P1-M1-G5
cggacgcgtgggcggacgcgtnggggattacaacacttgaaggagaaaaggatctatccaaatactcattgcaacagcaccgtcgcattgttcagtacaagactgcctattattcattttatcttcctgttgcgtgtgcactggttatgtgtggtgaaaatcttgacaaccacatcgatgtaaagaacattcttgttgacatgggaatctactttcaagtacaggatgactatttggattgctttggcaatcctgagaccattggtaagattggaactgatattgaagattttaagtgctcttggttggtggttaaagctttggaaatctgtaatgaggagcagaagaaagtgttatatgagaactatgggaaaccagaccc

SEQ ID NO: 584 - DNA, 224 bp, Gossypium hirsutum
  unsure (1)..(224): unsure at all n locations; Clone ID: LIB3493-048-P1-M1-G6
tggaggggttggtggtcgtgggatgtgtgacntaaataaaactataaacatatctatccacctcctcatttcaacttccccttcccattgtttaatacaagactcactatggttcatcatatactatattctgagacctactcatacaacactagaaattctttcatacatatcacttaaataacatttcaccacatctatctctaatatactgattcctctca

SEQ ID NO: 585 - DNA, 349 bp, Gossypium hirsutum
  Clone ID: LIB3493-048-P1-M1-G7
ctctctctctttctgttcctgttgctttgccgatctccgggattctgaatctcaaattaactgagtactgataggaaattatcaaatccgaggcaccatggaagcagacgacaagtttttgaacatgggtattctcatagtagccactctagtagtggccaaactcatatcgttcctcataatgcccagatctaagaggcgggtgccgccagtaatcaaaagctggccggtaattggtgggctccttcgattcatgaaaaggcccatcctgatgatcccggaggagttcccaaagctcggcagtgttttcacgtttaaccttgttaaaaagaaaataactttttttgat

SEQ ID NO: 586 - DNA, 388 bp, Gossypium hirsutum
  Clone ID: LIB3493-048-P1-M1-G8
aaataaaccaattttaatgtcgggggcctcgctctctaatgccactctctccactcctttcatcggccacaaccttcgtctaaatcagaatacgaaggatgggataaattgttttccttctcttagaaggcatggagtcccaagatgtgcagtggatatgccttacggaggtaatgctccaacttttcctcgaataagagtctgggatccgtataagcggctcggcattagtccttatgcttcagaggaagaaatttggtccgcacgcaattttctcttagaacaatatgccggacatgagagaagcgaagaatcaattgaagcagcattcgagaaactacttatggccagcttccagcatagaaagaaaacaaagattaacttgaaa

SEQ ID NO: 587 - DNA, 591 bp, Gossypium hirsutum
  Clone ID: LIB3493-048-P1-M1-G9
cggacgcgtgggccagattgggatgttgcccctgcgtaagcttattatcatccattgatcccccccttgagtgatgaagtccgtactctgaatcaaacaaagcacatgggcgggtaacaaatatttaataccttccatttaagcgatctgcaagggaaacattcaacaacccgaatatttctgattgtctgagaatctctgtctttgcatttcaccatgagacatgttatcatccaagctcttgcactgaagaaatatattaccgcataaataacatgtcttactaagatcttcaacatattaaacacgaataacctacctccccgtgagtatcaaaggaactgctctggcaatcccacgttactaacacgccagagaaatcttattacagggcccccttcaagaaattcccacaattaacaaccatttttgaagatcatgatgcattttgatttatcacctactgtcagattctttctttcacatttttatctgcttgtatatctacattgctatagcttgcaaaggcagcttattaattgaatgtccttgagattgatgaatgatatgaaaccaaaatttttaatcttc

SEQ ID NO: 588 - DNA, 594 bp, Gossypium hirsutum
  Clone ID: LIB3493-048-P1-M1-H1
gctgttacgagtgcatactataggggggctgccggggcaatgctggtttatgatgtaacgaaacgccagaccttcaatcacatcgcacgctggctagaagagttgcgtggtcatgctgacaagaacattgttataatgctggttgggaacaaaagtgacctcgaaaagcagcgggaagtctcaacagaggatgccaccgaatttgctcaaaaggaaggactatttttcttggagacctcagctcttgcagcgaaaaatgttgagaccgcattcttaacagtgcttactgagatcttcaacatagtgaacaagaaaaacctagttgccggtgagaatcaagggaacggcaatggcaatcccacgtcactagcaggcaagaaaatcatcatttccaggtccagctcaggaaaattcaggcaaagagcaacatgtgttgtagatcatgatgcaattggatttatcacctaatgtcagtttctttctttcacatttttatctgcttgtatatttacattgctatagcttgcaagggcagctaattaattgaatgtttttgagattgaggaatgatatgaaaccaaaattttgaagctt

SEQ ID NO: 589 - DNA, 581 bp, Gossypium hirsutum
  Clone ID: LIB3493-048-P1-M1-H10
gaagtggggaaagttctaacagaggtcccatagcttccaaacgcaaaatttttaatttttttctgggaatgtgcagttcaagatgagatagctttacacgtttcccaattcagcaacccatttctgcaaccaaaaacacaagacactccatcaatttataaactcgaagcaatttgaagaaaccccatcactcatttcacctccaatcctcttaaaaacagggcattcaatatgcaggagaccaataattctcgagtcaaccaacgaattgcaacaatctcggctcatctcaacccacccagcttttcccacatggagggtagttcgggtttgggtcgagctgactgccgagccaaaggtgggttaactggtttcaaggtggcgattttgggagcggcaggttgggatagggcaaccgttatcattgttgatgaagatgaatcctttggtttctgttcttcatctttatgatgtggttaacactcctggtgttactgctgatattagccatatggatactggagctgtggtacgtggatttctggggcaacagcaattggaggaggctctaacaggaatgg

SEQ ID NO: 590 - DNA, 380 bp, Gossypium hirsutum
  Clone ID: LIB3493-048-P1-M1-H11
attgtattcttagatttgtcattagtcttgcattactgttttgcttccttttcatcttaattcttaggatatatttctaggtttcattgtttgtgatacataggatgacttataaatgctaatagttttgcattagtcctctgtcatccgcaaggcatctttttagcattagtgcatgtattctcttaccacattgagtagttttgaactgctcctatgcattcctgtatatattttaaaatttctacaatggaattgtatattattgaaacttgggttttacttggatgaagtatacggggcagtcaggtggatcttcaaaacgagctagtggtcgtgaagcagttgctggaagtgagtttgacccacaacggtctcgt

SEQ ID NO: 591 - DNA, 568 bp, Gossypium hirsutum
  Clone ID: LIB3493-048-P1-M1-H12
ttatggcatatgataatgctgtgttgtgctttgggaaaaatatgtctgttccaccgagacagtattgatgcaactcaagttgttcctgcatggttaaactgcttgccaataaaaggtgatctgattgaagccaaagttgttcatgaacaactttgttcaatggttgaaaggtctgacaatgaagttttgggtcccaaccatcatttccttcctaagattgtttcagtttttgctgaggttttatgtggtaaggatttagccacagaacaaaccgcaagtaggatggtgaatctactgaggcaacttcaacagactttaccaccagcagcattggcttcaactttatcatctttgcagccgcaacaacagcttgctttacaatccatcctctcctcctaagtaacaatggctcgatactaatccgccttgtgcatcaatgcatatatttattttatataccaaattcttttcacggagaaggttcccttcgtttttgcatcatgttctttttactccctcggggattgaaatgaactttcctccctagatatataaaattttatagaat

SEQ ID NO: 592 - DNA, 366 bp, Gossypium hirsutum
  Clone ID: LIB3493-048-P1-M1-H2
caaaagtggtgctgtttttgactcggcgcaagttaaagtggatgaatggtcagcacttaatagcgattccctttgaggagttgtcccagcttattggtgagcgctggaagagtactgggcttctcacacagtcagaagggccatttgtagatgatgcagttcaactgcttaaggatgggatcgacttggtaactgattcggatacagcactctctaacttgctgtcttaccctgtacatgctactttgacgagccctgaaggtagacccattgtcgaagataagctttctgaagtttctgcccacctattagctgcctatgatagtggtgaactctttggtgcattggaagaaggccttgctggct

SEQ ID NO: 593 - DNA, 493 bp, Gossypium hirsutum
  Clone ID: LIB3493-048-P1-M1-H3
gaaacatggagtaaagttaggactgatgtcgggatttgtaaaggcagctgttagcgctcttcagaatcaaccaattgtcaatgctgtaattgatggggacgacataatatatagagattacattgatatcagtattgctgttggtactccaaagggccttgtagttccagtaatccgaaatgctgacagaatgaactttgctgaaattgagaaagggataaacatccttgctaagaaggcaaatgatggatctttatcaattgatgagatggctgggggctcattcacaatatccaatggtggtgtttatggaagcctcttaagtactccaattattaatccccctcagtcggctattctgggaatgcactccatagttagccgtccaatggttgtcagtggagaaagtgtttccaagccaatgatgtacattgcactgacatatgaccatcgactgattgatggaagggaagccgtattcttcttgcgtcgc

SEQ ID NO: 594 - DNA, 364 bp, Gossypium hirsutum
  Clone ID: LIB3493-048-P1-M1-H4
agacaatgagaggaacattgacgtggacgtggattctgatgagatgcctctcccaagtagcggtgcaaagccaatactactcagagagcttaccatatgatcccaggccggttaaggtcactaatcttcacttctttttgcacgaaactctccgcggtaagaacccaacaatagtcatggtagcccaagctaacaacacaagcaacgacaactactcatcagtgccatttggcaccctatatgccattgatgatctcctcaagataggtcctggggacaactcagaggtgattgggaatgctctgggacttgggatcttggccggcaaaaattcaacgaccgtggtgatgtacttagattttgg

SEQ ID NO: 595 - DNA, 373 bp, Gossypium hirsutum
  Clone ID: LIB3493-048-P1-M1-H5
cggacacgtggggttttttctacgggagtcattctacgggcagcagccccatcaatcactgctgtatagaatgatggaagtttccccgacactgatatggtgccaaccctcaaagctataatcgaacaagactcggatccagatgccactgttgttgaaattacctctggcgatccgactatgagcgcttcttgatactatgaatgcacttaaaagtctcgggttgaatgttactaacgcaaatgtctatttggattcatctgggaagcacaacaagttttgcatcaccaaggctagcactggaaggaaagttgaagaaccagaactgctcgaggcaatacgtttgacgattataaacaacttacttgagttt

SEQ ID NO: 596 - DNA, 380 bp, Gossypium hirsutum
  Clone ID: LIB3493-048-P1-M1-H6
gttttgagataacataaagaagatggagcccatgaaagagcaccactgagtcactcatggaaatgggttcgagttctctgtctgactcaggtggttcttccattgattcactcaacaacaacgccttgaagttgggtcgaaatatctacttcaatgattcctccgccgctgtcaacgatggtcctgctactatgaagactcaatcaccaccgtcacagcgacctctgggttgtaagaaacctagggctggtgggatgattcacggtggtcaaccaccgaggtgtcaagtagaagggtgtgaagtggatctgagtgatgttaaggcttattatgcaaggcataaagtttgtgttactcattcaaaatcacctaaagccatt

SEQ ID NO: 597 - DNA, 338 bp, Gossypium hirsutum
  Clone ID: LIB3493-048-P1-M1-H7
ctggttccgaaaatgcggggtgggagctaaaagtgcaaattatggaaggattatatcctttggaaaagatgtcacggaggcacctttatccgacattgatagaagagacctcagctgtgctcttaatggtcatggtgctgtaaacacgactcgtacaaacttgttaacggtatgccctgacatgggactcgttcgtatccaaccctatggaacgacgtatttcttatcgctgaccacactaccttgcaccaacccttattgtgaccccattctcaacaatgctcactgtgatcttcaacataccctacaagataaacctaattgccggtgagaatcaa

SEQ ID NO: 598 - DNA, 365 bp, Gossypium hirsutum
  Clone ID: LIB3493-048-P1-M1-H8
cagaatgcttctttcttccctggtgcgcctttccatctttctttgctaggaattcaacctagcttgcgccaccctggaggatcatcggtgccacgcacctccaccccaccgccggttcacggatcaagaccagatatagctgcgaaaatctcggaatcgagaggcgtggcggagtgggacgctggtgagaggcgtgcggcgcaaggactcatgcaacaactttgagtctctgttcgtttgggccttgtttgggtctacttttgtgcctatttttcttgtattggatcatggcatgaatttggtcctacacacaccacacaaggaaaaaacgttatgtttagaacgattaccattggagcatcgga

SEQ ID NO: 599 - DNA, 520 bp, Gossypium hirsutum
  Clone ID: LIB3493-048-P1-M1-H9
aaaaaagcagactctgtatcttctgttcctctctaccatttccttctttaagctaatttattagtttcttgctagctaagcatggcaaaagaaggagagaacagcactttccatgccagggattatgttgaccctccaccagcaccattgattgatgcttcagagcttaagaaatggtcattttacagagcattgatagctgagttcattgcaactatgctcttcctttacatcacagtcttgactgtgattggtcacaagagccaagttgctacctcccctgatgcatgttctggtgttggccttcttggtattgcttgggcctttggtggcatgatcttcatccttgtttactgcactgctggtatttctgggggtcatattaacccagcagtgacatttgggcttgtttttggctcgtaaggtctcattgatccgagccattgcatacatggtggctcagtcattgggagccatatgtggggttgggctggttaaggcattccaatcagcatactac

SEQ ID NO: 600 - DNA, 370 bp, Gossypium hirsutum
  unsure (1)..(370): unsure at all n locations; Clone ID: LIB3493-049-P1-M1-A1
ctcattcttaaccacaaagaaacagaaatgaaacgactaacctaaacaaattcggacctgaaagctcatcttccctttcgttaaactccaaatctcctctgtatcagttactcacaaaaaccgattatcgcccaggatcaaacctattgaagtcttcttctcggtcggaagcgcgagttcatcggacaaacaaagtgtcgcaaagtctggactctaactctccatctcttcaacttctctattacctctcctttctccatccaccagtccttccaccgcacacgggatctcctctatccagtattgggggttttcatgccgncatccttccatcgccatcccatgggctgcctttatagcttccctggag

SEQ ID NO: 601 - DNA, 278 bp, Gossypium hirsutum
  Clone ID: LIB3493-049-P1-M1-A10
gtctacccccatgttgctactggatttgcagacacgtctgcgtttctccgagaattgactctcaagtccatgcttatattggctcctaagctttcacaacgtactttgtcaggctcattactgaagtatctttccaagttacaggttgatgaagaacctgcaattagaacaaataccaccatattattgggaaacattgcaagctacctaaatgaagggacacggaagagagttttgatcaatgcatttacggtccgtgcattgcgtgatactttctc

SEQ ID NO: 602 - DNA, 243 bp, Gossypium hirsutum
  Clone ID: LIB3493-049-P1-M1-A11
cttctatctttattttctcgcctgtgacgagaagccgacgctaccatggttcacgtcagtttctaccgcaactatgggaagacctttaagaagccacgacgtccgtatgagaaggaacgattggatgctgagttgaggcttgtaggagagtatgggctccgatgtaagagggagctgtggagggttcagtatgctttgagccgcatccgtaatgctgctagggaccttctcacttttggatga

SEQ ID NO: 603 - DNA, 379 bp, Gossypium hirsutum
  Clone ID: LIB3493-049-P1-M1-A12
cggacgcgtgggtgagtgcaaatcttactaagccccagctcacactcctctgtcccattaactgtatgagagagaggaaatctgattttcaatttcatcactgcatcttctctttgcttttggcctcatcttcagaaaggtaagtcaagttctttagattgcttgccgctttttgagtttcaagatctatgaaccccagatctgtagagccttgatcttgttgctgaattcttgaattttagtagtttgggttcttttgctttttccttaataactagatttagtttattgtaagggcattttagctcattcaggatgttgggtcgtcctgggttatctagaactggaaagcttaggcctgagaatctaggacaaaatg

SEQ ID NO: 604 - DNA, 153 bp, Gossypium hirsutum
  Clone ID: LIB3493-049-P1-M1-A3
ctacgccatcatggtataaactataggagacttgatggaacaatgactttaactgcacgagaccggaatgtcaaacatttcaatactgacccagaggtaactgtgatgctgatgtcattaaaagcgggaaaccttggtttgaatatggttgct

SEQ ID NO: 605 - DNA, 254 bp, Gossypium hirsutum
  Clone ID: LIB3493-049-P1-M1-A4
ctcacacatactctgacatcttaggggtcggcgtgtttttatctggaatcttcacttcgggtgttaggttgctccagtaacagtccaatcatgacctcaaaaacatggacgctattcctcccattgatgcactcaaccctaccgacttcaatgtacccaatgttgacattcaccaaaatcatccttttccaaaagaaaccttaattgctacttaaatgtatggacacggaagagagttttgatcaatgcattta

SEQ ID NO: 606 - DNA, 295 bp, Gossypium hirsutum
  unsure (1)..(295): unsure at all n locations; Clone ID: LIB3493-049-P1-M1-A5
cggacgcgtgggattggtttcaccaaactaagaaataaaagcaactctcttcctcgcctgtccattttcttggaaaattttccctttttccctttttccctttcacttctttctctccaaacatgggcatctcatggagcaacacaagcaatagcaaccggaggagaaaccaagcttacctccatggccctccacctcctccacctttctattatccccaagaacccacttnccttcctccttcgccacctncaccgncatcccagccttctactacccacccttatcctgcgca

SEQ ID NO: 607 - DNA, 342 bp, Gossypium hirsutum
  Clone ID: LIB3493-049-P1-M1-A6
gtttaagggattttttcatttgtttcttggtacgctcgattacctcacgaaaagagaaaatgaccaagtgttacccaactgtgagcgaggaataccagaagtcagttgaaaaggctaagaggaagctcagaggtctcatcgctgagaagaactgtgctccactcatgctccgtctagcgtggcactcagctggaacttttgatgttaagaccaagacaggaggtccattcggaaccatgaagcatcctgctgagctcgcacatgctgctaacaacggccttgatatcgccgtcagacttctcgagccgatcaaagagcagttccctaacctcacctacgctg

SEQ ID NO: 608 - DNA, 167 bp, Gossypium hirsutum
  unsure (1)..(167): unsure at all n locations; Clone ID: LIB3493-049-P1-M1-A8
cgttattgcaatttgagcggaaacatgcttttgatgattagcaacttangctttttgaattgcagttacagtttgttcattcttgattttaatggattttttcgataaatatgttttaatttaagtcgattggttcttagcgtgtgcatgcaagacgttctgttgat

SEQ ID NO: 609 - DNA, 356 bp, Gossypium hirsutum
  Clone ID: LIB3493-049-P1-M1-A9
acctggggatcatgtgcttcctatgttcaccggagaatgcaaagaatgtcgccactgtctgtcagaagaaagcaataacatgtgcgaactgcttaggatcaactgcgaccgaggtgttatgcttgctgatgggaaaaccagattttccatcaacggcaagcctatctaccactttgttggaacctcgacttttagccaatatactgtcgtccatgttggccaggttgccaagatcagtccaaccgccccgcttgataaagtctgtcccattagctgtgggatatgtacaggttttggggccactgtgaatgttgccaaacccaaaaagggtcaaacttgtgcagtttttggactgg

SEQ ID NO: 610 - DNA, 387 bp, Gossypium hirsutum
  Clone ID: LIB3493-049-P1-M1-B1
cccacgcgtccggggggggatgggggggaggggggcagggtaaacaagcttaaaatctcacaaaaagatggctatactgtttatttgatatagcaagtattcaagaaaaagaaaatcccattttttgttaaaagggttttagattgctgtgttttgggagaggcaaaggggttgatttttataccaaaagatgaggttaggcaaagggtttcagtttgagttgtatcttcaaggggaaccccttattccaggccttcctgatgatgttgcccttaattgtctccttcgacttccggtcgagagccataccgcttgtaaagccctatgcaaaccatggcacttttttgttggtaataaaaaaccaattttcactttaaaggaaggaac

SEQ ID NO: 611 - DNA, 301 bp, Gossypium hirsutum
  unsure (1)..(301): unsure at all n locations; Clone ID: LIB3493-049-P1-M1-B10
gtttaaaaatactttttttggttgggttatcttgccctacgaacaatagcaaagccttcagtccttagaaacatactttagaagcaaatagaagaccccgattttgataaatagtcaaaggcttttgacattcacatatatatatatatagtagcaaacttccatcttctgctttcagtagttacagtgacattgaatcgtctaggtacggtttttgcacttctccatagccctcngagctaggccgatagcctctgtactcttcatgatcctcaatctcttacacgaatcggttaacctt

SEQ ID NO: 612 - DNA, 317 bp, Gossypium hirsutum
  Clone ID: LIB3493-049-P1-M1-B12
cttctccgtcgggttcagagccggcgatggaactccaagctattacagataagactgttaagtccttcaagaaggttatttctttattggggcagcccagaaccggacatgctcgatttagacgtgctcctcttagtcatctcgaacaagaggtgaaacaccagcaacaagatgcacgacaacctcggcaaaagataccagagtcaggggattcttctcttcaagtagccaaaaatcaggtgtctgcttttaagcctttttgttcaagtctgggtcataggttgcctcctctgcctcacaatcaccacccgaagtaa

SEQ ID NO: 613 - DNA, 334 bp, Gossypium hirsutum
  Clone ID: LIB3493-049-P1-M1-B2
cacaaagatggtatgcgcatcaaattggggtttcataaccttactggcttcagtatgtttatcggcgtgctatggtaagaggaccggaatctgcaccatggctgacggagccgatgggtttcaaccaagcaacggttttccgcatgaagcttgatcctgattcttcaacctctatcgatcctgatcctaccggattcagtgctgggatatgtatatgttatgaaagaagcccttactgtatcgactgcgacgatgtggatatcatgggccgcagcttatgcagagcctgcaattactgatgcccttactcgaagttcaataattggtgtggggg

SEQ ID NO: 614 - DNA, 242 bp, Gossypium hirsutum
  Clone ID: LIB3493-049-P1-M1-B4
gatcttgacattttgtttaataaaagtcgtgatgccaattgccacttggaacaaaactttattggcatctactttacaaacaactgagggtgggggaaattcttgttttgtaggattttcctcaaagattctagcatcaccaagtttaaagatcttgaatgatcaaaatggacatgttgatttcggattgcacaaaaacattctttcttcaccagttaaccaacttgtttgtattttttttt

SEQ ID NO: 615 - DNA, 324 bp, Gossypium hirsutum
  Clone ID: LIB3493-049-P1-M1-B5
tccaaaccgaccccccccccccacccccagaaaaaagaggttgtctgcaaaaattaagatctcaatatattattcttcgtcgttctcctttagagatttccttttaagtttgtttttccccccttagtttaaaagatgtcatcaagtgaagaacccttctcacaagtgcaggcacggttagctgtgcttgcatctcatttagcagctcctgattgctcctccaacaacctcaattcttctgtcctcgagccatggtgcgtgtcggctcagaacggtggctctgttggcctttcattaaccatcatcgacgagcgaaccgggaag

SEQ ID NO: 616 - DNA, 280 bp, Gossypium hirsutum
  Clone ID: LIB3493-049-P1-M1-B6
attgatttaactcttgattatgggggagggagtattgaacataggggacactcccatacactgagatggaatcaaagggaattctaggagcataatatctgatgagatttctcccgcggatccagtatgtttggccctagtcattcctgattgccatcataaccaggagattgtcccactaaaaacatattttggtggacaggaaggtgttggaaagtatacttttcatataacaaataccaagccaaatgggttggttttgacagatatatctagctct

SEQ ID NO: 617 - DNA, 359 bp, Gossypium hirsutum
  Clone ID: LIB3493-049-P1-M1-B7
tttctttgtcaagtaacacgcatgcatcatacatgaacggtgttagcttcgcctccggtggttccgcaatcttgaatacctccagtcaagttctcgggcaatccatacctctttcggatcaagtgaacaacttcttatcagtgcataaagtcatgctgcagaagatgggaactgatggtttagaaaaacatttttccaagtctcttttcgccattgttattggtagcaatgatatcttgaattactttgaatccgaagatgaaaaggacaccccggaacatcttgtgaatttaatggttaacaacctgaaagcagaaatcaagaaattatacggattcggagcgcataaaattttggtg

SEQ ID NO: 618 - DNA, 314 bp, Gossypium hirsutum
  Clone ID: LIB3493-049-P1-M1-B8
ttttaatcggcgaaaaagagaatgcattcgactcatctggtactcgaagagccaatcaggatggcttcaatcctggagccatcgaaggctagcttttttccggcaatgacgaagatagtgggaactttaggtccaaaatctcgatccattgaagtcatttccggttgccttaaagctggaatgtctgtggctaggttcgatttctcgtggcatgatccggcgtatcatcaggaaactttagaaaatttgaaggctgccgttaagctcactaagaagctttgtgcggttatgttggatactgtgggtgctgagat

SEQ ID NO: 619 - DNA, 342 bp, Gossypium hirsutum
  Clone ID: LIB3493-049-P1-M1-B9
caggtgcagaacaattatcttatggatcaaatagtctgatgagagatggcctggttaataatcctttagttccttctggagactctaaaatgctaagctgtttatcaaacatcggagataatcatgagacacagttatctgctaatacactggcatttcttcgggataattcccagcatttctccaattctaataattcagctgctaacatcaggggtgaacactctcaaatcagtctccaaatggttctgtcctggtttgatccggattgggcaattaaaaatgggaaaatggtccccatacatgatgccccaaaaactggcttggatggtacggaaaaag

SEQ ID NO: 620 - DNA, 275 bp, Gossypium hirsutum
  Clone ID: LIB3493-049-P1-M1-C1
cttttagctcacaggttccattgtttttcagtagtaaagagcaaaaaacagaagggaaatcaatggaagggaaagaagaagatgttagattgggagctaacaagttctcagaaaggcagcctattgggacagcagctcagtcccaagatgataaggattacactgagccaccaccagcacccttgtttgagcctagtgagttgacctcatggtctttttaccgagctggaatcgctgagttcgttgctactttccttttcttggatatctcggga

SEQ ID NO: 621 - DNA, 369 bp, Gossypium hirsutum
  Clone ID: LIB3493-049-P1-M1-C10
catttctattattcttgttccttgccttacctgtcaagatcaaaagaaactcaactaccaaaacaaaaccactcaccaggccactaccttctggaatctatctgtcttgagcctaccaaaaatccaacatggaagattacaacagatcaaggtcatatggcaatggaatgatgcagctggacacttaccatggaccacctaggccttcagcttcttatgacctcaggtgccatagtgctgctgcctatgcacagtcccagatggctaacaactacaactcggggaacaacagggacttcaagttgaagaaagggaagagtacttcagcctcatcttcttcgaatccatggagctttggtgaccctgaat

SEQ ID NO: 622 - DNA, 448 bp, Gossypium hirsutum
  Clone ID: LIB3493-049-P1-M1-C11
attttaagaagtagagaaaaggcgcaaagtggccgactccgactcgccgctcccacatttacgcaacgcaacgcctcattgaacaacgaaagcggcggtggtttagggttttagtagagcaaaaacatagaaaagaaggaagtaggtaggcatggtgaagctcacggccgacttgatttggaagtgtcctcacttcttcaatgccctcaaagagcgagaattggatcttccaggtaacaaaattgctgtaatcaaaaacttgggtgctaccaaagaccaattcaataccatagatttatcttacaataaaattgtgaaacttgacaacttcccttatcttaaacacttaagtactttacttataaacaacaaccaaattacctttattcaatcccaattttaaaaattccttcccaaattacatacctttattctcacaaataaccca

SEQ ID NO: 623 - DNA, 339 bp, Gossypium hirsutum
  Clone ID: LIB3493-049-P1-M1-C12
gaaattttctttctcgatggtctgtttagccaaaaaagatgcagatcttcgttaagactctaaccggcaagacgatcactctcgaggtcgagagctccgacacgatcgacaacgtgaagaccaaaatccaagataaggaaggcatccctccagaccagcagcgtctgatcttcgccggaaaacagcttgaggacggccggaccttggccgattacaacatccaaaaggagtcaactctccacctcgtcctccgtttgcgcggtgggatgcaaatcttcgtgaaaaccttgaccggcaagacaatcactctcgaggtcgagagctccgacacgatcgaca

SEQ ID NO: 624 - DNA, 320 bp, Gossypium hirsutum
  Clone ID: LIB3493-049-P1-M1-C2
agctgtttcaactgatgataatggggttgaaattctagcaaactcagatggggttaggttcctacggacggtggagaatcgttcatttgatgcttctagagttgctcctgctgctatagtaaaggctcctagtgttggtccatttggctctaacaatgcaactattggaacaaccattggtgatcgggctgcaccagtaactgctatagttggaacaaacaatgatgctcgaactttggctgatataaagcccaggattacagatgagtcagcggaaaaatctaagatctggaaacttacagaaattaatgaaccatcac

SEQ ID NO: 625 - DNA, 363 bp, Gossypium hirsutum
  Clone ID: LIB3493-049-P1-M1-C3
gtttggaaacgtgcttgtcgattcattatcccttggacctgtggctccttttgatgctgctgcgatctttcttgccattgggatggccattattttatcatcatggactgaaaatttcggagatccttcagaaaataaggacttgctgacccagttcaggggcgctgctgtagcaatagcttcggatgaaaaaattgctttgctgggtgccatacagtctctgtttgaaggttcaatgtacacattcgtgttcctttggacacctgctttgagccccaacgacgaagagatccctcacgggttcatattcgccactttcatgttggcttcgatggtgggaagctcccttgcatctcggttgat

SEQ ID NO: 626 - DNA, 561 bp, Gossypium hirsutum
  unsure (1)..(561): unsure at all n locations; Clone ID: LIB3493-049-P1-M1-C4
cccacgcgtccgggagaaagcattgaggccatactttgaactgacaaatgctgtccgcattggtgatttggagcttttcagatctgttgctgagaagttctcaactactttcagttcagaccggacccataacttgattgttaggctgcggcataatgtcattcggactgggctacgcaacataagtatctcatattctcgcatcgcactggccgatgttgcgaagaagcttagattggactctgttgctgatgctgagagcatagtagccaaggcaatcagagatggagctatcgatgcgacattggatcattcaaatggatgtatgctgtccaaggagacgggtgacatctactctacaactgagcctcanacggcattcaactctaagatggctttctgcctcaatatgcataacgaggctgtgcgtgcacttcggttccaccaaactcccacaaggagaaagaaagtgctgtgaagaggagagaaagacaacaacacgagccagagcttgcaaagcacattgctgtggaagatgacgaccaattttatagattgaca

SEQ ID NO: 627 - DNA, 502 bp, Gossypium hirsutum
  Clone ID: LIB3493-049-P1-M1-C5
agcacaagctcacaaacaggtacatatatctgaagcaagggttgctaccgctttggataaactagcttacatggaggaattggttaatgataagctgttagaagatagaaatgcaacagggtccgatgtagcatccccttcttctagtacatcaacacaatctttggaagtgaagaggaagttgcctcgaaaaagcttggatgtgtcaggtccagttaaaccatatcacccgcggttgaagaatttctggtatcccgttgctttctccacggatctgaaagatgacactatgattccgatcgattgttttgaagagccatgggttctttttcggggaaaagacgggaatccaggatgcctccagaacacttgtgcacatagaacatgtccttttcatcttggttcaattaatgaggggcggatccaatgtccctaccatggctgggaatacacaacagatggaaaatgtgaaaaaatgccgtctacacaattacttaatgtg

SEQ ID NO: 628 - DNA, 529 bp, Gossypium hirsutum
  Clone ID: LIB3493-049-P1-M1-C6
aagagaaaaaaaaatggctttgcaaaaggcgaaggacatcgtatctaccaatcctgtcgtcgttttcagcaagtcctactgtccgttctgtgtggatgtgaagcaattgcttcaacaacttggagcttctttcaaggccattgagctcgacagagaaagtgatggatctgatattcaagcagctctggctgagtggaccggccagcggactgtgccaaacgttttcattggtgggaaacacattggtggctgtgattctacaatggccttgcacaaggaaggtaagctggttcctctgctaactgaagctggagctattacaaaatcatctgtttagaatagagttaaactgcttgtctcccctaaattaataaacgaataccaagttcgatttcatgttgattctgtactttaaagtgaatccataatatagcatatagacatcgaactgaattgctgttgaacttcctagtaatattttcatgttcaagtttctttttacagctgaatctaatattatagatttgtc

SEQ ID NO: 629 - DNA, 295 bp, Gossypium hirsutum
  Clone ID: LIB3493-049-P1-M1-C7
tttccccctctctcgttctcgccagctaaatttcggaaattgtccttattcttttgaaaacgattgcttcgtttttttcctaaaatttgatctaagcgatgaacttttttactcgggaaattcccccattctatcataaatgatatgagtttcatcaaagacataatcgactctctaagctcaatcatctcaaccgatagcatgccatatgaatcaacgcaaaagcctagttcgtccacgtgtcagaacatggagggaatagctggaaaccaacgcaccgcgtataagctcaaag

SEQ ID NO: 630 - DNA, 361 bp, Gossypium hirsutum
  unsure (1)..(361): unsure at all n locations; Clone ID: LIB3493-049-P1-M1-C8
aacagctaccgccatttgtgttcaagcccctgcagagaaaggatttaccagctttgccattgatttcctcatgggtggagtttctgctgctgtgtcaaaaacagctgctgctccgattgagcgtgttaagcttttgatacagaaccaggatgaaatgatcaaaactggtaggctctctgagccctacaagggtatcgttgattgtttcaggcgaacaatgaaagatgaaagagtggtttctttgtggaggggaaacactgctaatgttattcgttatttccccactcangctttgaacttttctttcaaagactactttaaaaagcttttcaactttaaaaaaaaccaggatggtttcctg

SEQ ID NO: 631 - DNA, 353 bp, Gossypium hirsutum
  Clone ID: LIB3493-049-P1-M1-C9
ggagaccttgttcctaacagcgacctcgcaaaactactagcctgtgcctttgtcttcacgggaatggctctggtcggacttgtactgaccaaagctgctgactacttggcggagaagcaagaaatattgctggttaaagctttacacatgaatcaaaaagttggtgaacttcaagttcttaaggagattgaaactaatagggtgaaatacaagttttatacaacactaatcattcttgttgtgcttatattaaccgggaccatcttcctatatgaagttgagaatttaggcctagtcgattcgttctactgcgtttgttctaccattacaaccttgggatatggagataaaag

SEQ ID NO: 632 - DNA, 301 bp, Gossypium hirsutum
  Clone ID: LIB3493-049-P1-M1-D1
ttgcagacattcggggaatgaatgttgctgttactcgtgccagaagggctttattggttatgggtaatgccaaagctctggtgcaatccgatgactgggcagacttaattgctgatgccaaagctaggaattgttatgtggacattgattctctccccaaggacttccaaaaagactttgtctgcaaagaattttctgggcccacgggacttggttaccctccatcgcaggtaaggcttctaacacaaggagtttcaagtatgctggaccgagacatatatcaggagatatgcacatggac

SEQ ID NO: 633 - DNA, 365 bp, Gossypium hirsutum
  unsure (1)..(365): unsure at all n locations; Clone ID: LIB3493-049-P1-M1-D10
atctattctgcggcgttacatggatgacattggagtttcaaatgatgatgcactctcagggttttccctaaggcgcccatctcgagctgaacgtgctatagatgatcctatacgagaaatggaaggcatgcttgtggacgagtatggaagtaatgctacatttcagctgcctggcctcttgtcttctaatgcatttgacgatgatgaggaagagctttcggacagtccttgcggagaagctgctgacgcatcacctttagaaacagctcangctttagtagagctagaagcgtgtacagttactccaagtgataggcgtcattgcatcttaaaagacgtggatggtgagctngaaatggaggatg

SEQ ID NO: 634 - DNA, 378 bp, Gossypium hirsutum
  Clone ID: LIB3493-049-P1-M1-D11
ttttaagatttgtccctgagaagacttcagatagattaggatttgaaaacgagacagtagctgatggtgttcataaaagctacttgtttagacctgatgtcataggtcctgctggtttgacccctcttcacattgcagctggtaaagatggttccgaggatttgctggatgcattgactgatgatcctggaaaggttggcattgatgcttggaaaaatgctcgagacagcaccggttctacacctgaagattacgctcgcttgcgtggccattactcttacatccacctggtacagaagaaaattaataagagaccaccttctgggcatgtggtcgtcgatattccaagtgccgtctctgactgtagcacaaacgaga

SEQ ID NO: 635 - DNA, 566 bp, Gossypium hirsutum
  unsure (1)..(566): unsure at all n locations; Clone ID: LIB3493-049-P1-M1-D12
ggaagaagggagtagcagagttcgaagaaacggcgccggatgacttcgacccggccaatccctacaaagacccggtggccatgcttgaaatgagggagcatatagttcgagagaaatggattgacattgagaaagccaagatcctccgtgacaaggtcaggtggtgctaccgcatcgaaggggtcaaccatctccagaagtgccgccatctcgtacgccagtacctcgacgccacccgtggcatcggctggggcaaggatggccgtcatccctccctccacggtccanaggttgaagagatcgattcagaatgaatggctgcatttggtcatgataggtgactgactntgggcagcaaagtaaggagtgtgggatttgaataatgtncacctacatngncaactatngtgnttgggttggaagactcttaatacaagatcagacgtgatggcattttcttttttcattcttggcaactttcaaaatcttggtaaaatacctgggccaggtgtgcgttacacgtccttagattaatggaataaggtcctttggatttcatgcgctgg

SEQ ID NO: 636 - DNA, 323 bp, Gossypium hirsutum
  Clone ID: LIB3493-049-P1-M1-D2
gtggttgctgacagctgcttgcatcaaaacgggaaggccacaaattgcaagacgcgcaatagaccttgctgagacacgcttgttgaaagatgggtggccagaatattatgacggcaaacttgggagatatgtcggtaaacaggctaggaagtatcagacatggtcaatagcaggatatttagtggcaaaaatgatgatggaggatccgtcgcacttggggatgatttctttggaggaggacaaacagatgaaaccattgataaaaagatcatcttcttggacttgctaaaaaaaggaaaaaaaaaaaaccagaattgggaaat

SEQ ID NO: 637 - DNA, 306 bp, Gossypium hirsutum
  Clone ID: LIB3493-049-P1-M1-D3
ctgatctagtggacctcagagccgttccaactgaagacgctgttgagttcgcagaggatcagggcctattcttcgccgagacgtccgctcttagcggtgacaatgtggataaagcttttttcaagctgctgggtgagatttacggtgtgctttgtaaaaaatccttggaatgtgggaatggaaaactcaacggtgctgatcacgccaccgcgttgaaaggatctaagattgaggtcatcgctggccctgatttacaaagtagtgagatgaaaaaagtgtctacctgctctgggtgaaacttttttc

SEQ ID NO: 638 - DNA, 302 bp, Gossypium hirsutum
  Clone ID: LIB3493-049-P1-M1-D4
caaccatctttgccctttcattgcttccttgcctgccttaaacctccttcaagcatagccatgactactgaaatggtaatggttgatgaagtcccttttcctccacaaatcacaactaccaagccactatctcttttgggtcatggaattaccgacattgagattcactttttgcaaatcaagttcacagcaattggggtttaccttgaaccagaagttgtaggacatttgcaacaatggaaggggaagcctggggacgtgctagctgaagatgatgacttcttcgaggctcttattaatgc

SEQ ID NO: 639 - DNA, 202 bp, Gossypium hirsutum
  Clone ID: LIB3493-049-P1-M1-D5
ctggcttcggtgctttcggagaattcagattttcgtttggactttttctttcggctattatcaaggatgattcactttgtacttttaattagtcgacaagggaaagttaggttgacaaaatggtattctccttattctcagaaggaaagaacaaaggttatccgtgagctcggtggggtgattctacatccatggccaaaac

SEQ ID NO: 640 - DNA, 476 bp, Gossypium hirsutum
  unsure (1)..(476): unsure at all n locations; Clone ID: LIB3493-049-P1-M1-D6
gaaatttgctcaaattcccagctcaaggttgattgtcatctgaaaattatacttctctatctttttactttatttcgccttcaaatcaaccaaatgccagttttgacttgtattttcacctcacgttgtggagctcgagaacaaactgaaagagcatgttcagaatcagacagcatccttgtctctacagacatagtgtaagcctaaaatgaaactttgacattttaactttgttgagtaacaataagttcattaaatatgatatccgctattgaatatatggaaaacttagcatcaatactaatntatcaagaggatgtaaatacatatgagtgtataatttcacacgtgaagaagctgaaaacattttgaagagagaacacgggaattgagcttcattcatggacgcttcaacagaaggtaattgtaactaacgaaaatgtttgacttaaatatcaaaatattttggctaaatg

SEQ ID NO: 641 - DNA, 444 bp, Gossypium hirsutum
  Clone ID: LIB3493-049-P1-M1-D7
ttttgagattcgatgagtcgcttcgatgctaaccctttcgcagaggaagaggtcaatcctttttcggatccagcagttaggaaaggatcggggcaatcaaattatggtggaggtgccttttatactactaaccccggtagtgttcctcctgcaacatcaaggctttcaccccttcctcctgaaccatatgaccgtggtgcaactgtagatattcctcttgattctgccaaggatctaaaagcaagagaaaaggaacttaaagcaaaagaggctgaactgaataagcgtgaacaggaattgagaaggaaagaggatgcaatagcacgagctggaattgtaatagaggacaaaaattggccaccgtattttcctattatccatcatgatattgcaaatgaaataccagtccacctacaaaagattcagtatgttgctttcacaaca

SEQ ID NO: 642 - DNA, 214 bp, Gossypium hirsutum
  Clone ID: LIB3493-049-P1-M1-D8
gctacgcgcccttaagttggcttgatcttcgcatctttcgccggctccaccgtctcaaatctccgggccaactgtttcgctcactctcttattggactgatcgaaggccaagagcttcttcactttatcggcggctattttcagattggtattttacaaattagagataattgtcaaaggatagagccctgaggtggtttggctggtgtgaaaa

SEQ ID NO: 643 - DNA, 321 bp, Gossypium hirsutum
  Clone ID: LIB3493-049-P1-M1-D9
ctcgccgatgagatcaacactcgacaaaccatcacttgtcttgttcttaacaatggagctatgtctgctctcactgctaaacacccactttccgtcgttgaaaacatccttagccttcatgttcttttagattattatgacccacaaaaactccataaaatctccgatggtactacacttactactactctttaccaaaccaccggaaatgctcccggaaatctgggtttcgttaatatcaccgatctacaaggtgggaaagtcgggtttgggtcagccgttcctgggtctaaacttgattcgtcttatactaaagtctgt

SEQ ID NO: 644 - DNA, 144 bp, Gossypium hirsutum
  Clone ID: LIB3493-049-P1-M1-E1
cgaaaaagaatggtgaccgtggagagaagttcgtaaggctcaacgtgccaaaggccttcccaccgtttggcccatcggcacataacccccacctaattgtgttgatcagagcacataccttgactactattttcatatcacaaa

SEQ ID NO: 645 - DNA, 242 bp, Gossypium hirsutum
  Clone ID: LIB3493-049-P1-M1-E10
agatcatattgggaagcgaacgcaagtcagctgtcatttctgaagagtcacgaaaattgactgctttccacgaggctggccatgctcttgttgccatccatacggagggggcacttcctgttcacaaagcaacaatagtccctcgagggatggctcttggcatggtgtcccagttgcctgaggtggatcaaacaagcttctcccgaaaacagatgcttgctaggcttgatgttgccttgggt

SEQ ID NO: 646 - DNA, 389 bp, Gossypium hirsutum
  Clone ID: LIB3493-049-P1-M1-E11
cggacgcgtgggggctactgatcaaaacgtgatgcaaaaacatgctgcgttcttcgataggaatcatgacggccttgtttatccatgggagacttttcaaggttttcgagcaattggagctggttatttattgtcaatggcgggtgctgtcttcatcaacctttctcttagtggcacaactcgaccaggaaaatttccatctcttctctttcctattgaggttaaaaacatccaaatgggaaaacatgggagtgactctggtgtatacgaccgtgaaggaaggttcgtaccttcgaaatttgatgaaatcttcagcaagtacgcacgaacacatgctaatggcgtgacatctgatgaattaatggcgatgctcaaattaacagggaacc

SEQ ID NO: 647 - DNA, 512 bp, Gossypium hirsutum
  unsure (1)..(512): unsure at all n locations; Clone ID: LIB3493-049-P1-M1-E12
gcggcaagaattcttttgaaacccaaatactaataaacccaaatctttttatcgtttattaattaatattctaagttagctacgccttgcaatttcagttatttctaaatctatctctctaaggtttgggaaatcaaatgggagtgaaggtagagcactgatgtcactgttttggattgtaattcgtcgattagctgaaattgaagaaagaatggcaacgtcaaagaaagtgattacaagggaagagtgggaaaagagattgaatgatgttaaaatcaggaaagaagacatgaataaattggtgatgaattttcttgtcacggaggggtatgttgaagctgcttgaaaaattcagatggaatctggaaccaaccagacattgatcttgcaacaatctcggatcgcatggctgntaaaaaggctgtacaatgtggaaatgttgaggatgctattgagaaagttaacgatctaaatcctgagatattggatacaaacccacaactcttttttca

SEQ ID NO: 648 - DNA, 348 bp, Gossypium hirsutum
  Clone ID: LIB3493-049-P1-M1-E2
gaagaacagaggctgaaatacttggaattcgtgcaagtagccgccgttcacgccgctttgtgcttcaccaacctttacctttacgctaaggaaagatcggggccgttgaaacctagcgtcgagaccgttgagggaacggttaagtgcgtggttggaccggtttatgataaataccatgatgtccctgttgaattccttaaattcgttgattccaaggtgggtgaatcagtgaccaagcttgatcgtcgagtccctccagtcatcaaacaggtctcaaccgaagccatctctgcagcccaaaaggctcccgaggttgctcgtggcgtggcttccgaagtccaccgtgct

SEQ ID NO: 649 - DNA, 305 bp, Gossypium hirsutum
  unsure (1)..(305): unsure at all n locations; Clone ID: LIB3493-049-P1-M1-E3
cggacgcgtgggaaaaaaaatgaggttggcttttactctctccccgttctctctatggccggccggggggacacccaaatcgccgtccatcgtaccagcgccatatccggcggccaacggtgcgcgagggtgggtattgagccccgtttcaaggcgtgttcgaaagccaaaacgctcccaatcctcgaaagcgcgaagagaacggcacgagaagccctccgacgaagcggtcacgggacgatttcnggccggtgcttantcaaccgaagaaagaanggtttcttcttccattttcaattaaactt

SEQ ID NO: 650 - DNA, 280 bp, Gossypium hirsutum
  Clone ID: LIB3493-049-P1-M1-E4
cccggctgttctccatgcattatgtggagccggaatcaaggtcaccgtcgacctcccaaactagcaactcttcgccgctgctaaaagcactttctttgctaactctcgggtgcagcgaaacgtggccgcttactacccatacactgtaatagaagccattgccgtctgtaacgaagtcttcgtggacccccgcaatacgactaaattcctcgtacccgccatgaaaaatatccaccaagctttggttaaatccaaccttcactccgatattaaaaatctt

SEQ ID NO: 651 - DNA, 483 bp, Gossypium hirsutum
  Clone ID: LIB3493-049-P1-M1-E5
ggtgtttattatttgttgtttttggataattactgatgtctccgccgctgcttggcgtggaggaggaagggattcagagcaatgttactttactcggttcttcaggctcaatggaaagtgtgtgccagaatagtgctgacttgaaggaacggaactacatgggcttgtctgattgttcttcagtggatagctctgttttttcccctccgtccgaggaaagaaaggctagtttgaatctaaaggcgactgagcttaggctcggacttcctggattgcagttgcctgaaagaaatccagagctttgcttgttaagttcttctcagcttgatgagaagcccgttttccctttgcatccttcaagtgatggtcactgctttgcatcacagaaaaagtgttgttcagggaataaaagagggttctctgatgcaatggatgggttctcaaagggcaagtttctttctgattcaaaaattgatgttatgc

SEQ ID NO: 652 - DNA, 316 bp, Gossypium hirsutum
  unsure (1)..(316): unsure at all n locations; Clone ID: LIB3493-049-P1-M1-E6
gtttttctcaaatgggttggccctgtttgcatggataaggagctaatgcctttaattaagtgggagatggcaacctttagtactccaatgctggcagttctaatctttgcttctgtggcattattccccacgatatttctaccctcgtcaccatctatgtgggttgccgggatggcattcggttatggttttggatttctactaatcatctccgcanctgctgtgggtgtatcattgccattctttatcagctctcttttccttcacaggattcaaagcttgttagaaaaatatcctaaaaaaactacctttctta

SEQ ID NO: 653 - DNA, 291 bp, Gossypium hirsutum
  Clone ID: LIB3493-049-P1-M1-E7
aatgcattctgaaggtctgaacgagatgcaataaactccaccactgtggttgctgtcctaatcgctaccgttgcttttgcagccatcttcactgtccctggacaatatgttgatgaccctaatgacattccgcccggcgactccctcggagaagcaaatatagctccaaagcctggttctataatcctcttcatctttgattcaattgccctcttcatttctctggctgatggggggggtacaaccccatttttacctatacacttctaaataactaaaccccaatctatt

SEQ ID NO: 654 - DNA, 351 bp, Gossypium hirsutum
  Clone ID: LIB3493-049-P1-M1-E8
gaaaagaacaacagctgaacacaattgaaacatagcaacattgttcggcttcctaagaaatcaaaaattttctgttggaatcggaactatctttagacaagttggactccaaagattctaaactaaaaccataaccaataccctgtccaaatccgaacccaaggacacttgccccattgacacactgaaattgggtgcttgtgtggatctgctgggagggttggtgcacattggactaggtgacccggttgtgaatcaatgttgtccggttctttcaggactcgccgagctcgaagctgcggtctgcttgtgcaccaccctcaaacttaaagttctcaaccttaaaattta

SEQ ID NO: 655 - DNA, 218 bp, Gossypium hirsutum
  unsure (1)..(218): unsure at all n locations; Clone ID: LIB3493-049-P1-M1-E9
tctttctcccctactaagggagacgcactaatcgctagaaacgcactgaaactcanaaaccctgtcttcttccctttttatctattttgaactccaaaatggcgagcgaaaatgagagttccaggggctaggcaattcctggccgcaagatcccgttgatcactggcatcaccggtcaaaacggttcatacctcacctaattcctgctcaacaaaagt

SEQ ID NO: 656 - DNA, 328 bp, Gossypium hirsutum
  unsure (1)..(328): unsure at all n locations; Clone ID: LIB3493-049-P1-M1-F1
cggagatatattagtcccggtgggcggcattttatatcatgtaaagaagtcgctgcattcttgcaatcctgctttggtctccatgatgcacccttgacaatggataatgatggcgacattgctcagcatatttatcaaatggctcctgaaattgaaggtgcaatccagaaaggagatgatcaaaggcagactgaacgtgagaaggaagtcaacttactgggaatggataacctggcagaagttcaaatacatgatctttttgaatgtcataaatgcaatatgacttttgatgagaaagatgcatatttacaacatnctttatcatttc

SEQ ID NO: 657 - DNA, 261 bp, Gossypium hirsutum
  Clone ID: LIB3493-049-P1-M1-F10
atggcaggtcggggtaaaactcttggatccggggcctcgaagaaggcgacatcgaggagtagcaaggccgggcttcagtttccggtgggtcgtatcgctcggttccttaaggctggaaaatatgctgaacgtgtcggagctggagctcctgtttacctagctgccgttcttgaatatcttgcggctgaggttctcgagcttgctggaaatgcagccagagacaacaagaaaacccgaattgtgcctcgtcatatccagctt

SEQ ID NO: 658 - DNA, 321 bp, Gossypium hirsutum
  Clone ID: LIB3493-049-P1-M1-F11
gatccaaccatcattaatatcatattcattcaactcactgccccaaccagcattattggatgtggcttccatttcggctgatcgtattctcttgctggattcatatttcagtattgtaattttccatggcatgacaatagctcagtggcgcaacatgggttaccagaaccagcctgaacatcaggcatttgcacagcttttgcaagcaccccaggatgatgcacaaatgattattcgcgaacgcttccctgtccctagattggttgtatgtgatcagcatggatcccaagcaagatttttattggcaaaattgaacccatc

SEQ ID NO: 659 - DNA, 367 bp, Gossypium hirsutum
  Clone ID: LIB3493-049-P1-M1-F12
ctggacaggtcgttattttgtgtgagatcaatctgttcttgagttgagaatgattcctgttgcactgcatccgtttgctgccaaattcaactccatctttgaagcgttgtcagtattgagtttttgttggagcatgggtggccttggcttctagtgggcacttgccgctaaacaaatttcgaggaaaattggggaaaaccatatttaagacgcgaaacttgtaaggagtaaaatgccttaattggttacttgggatggagataaaaacgtgttaataagatcatctatcgggtttggggctatgtcttgaagtgttggttggaaaaaaaacttggtttactatcctaattatctatccaatgctcat

SEQ ID NO: 660 - DNA, 379 bp, Gossypium hirsutum
  Clone ID: LIB3493-049-P1-M1-F2
gaaataattttgctcacgtttgatctgatctgaaaagcacattgctttttcttttcagatctatcgaatggatcagattcaacatccaactgtcatgcagaaggtagctggccagctcctttcttctagcatttcccgagattttcaagggtatgatgggtctttcaggaggcctgccctataccaaggacattttgcatatgggaattattccaatgctggaatgcactatcctattgttccatcaacagctaccgccatttgtgttcaagcccctgcagagaaaggatttaccagctttgccattgatttcctcatgggtggagtttctgctgctgtgtcaaaaacagctgctgctcccattgagcgtgttaagctt

SEQ ID NO: 661 - DNA, 354 bp, Gossypium hirsutum
  Clone ID: LIB3493-049-P1-M1-F3
tcctctctcattttctctcaatccaaacagaggaagaaaataaagcattagcaagaaaaaatggcttcctcaacactctcaactgtctctctccgttccccttcttatccttcacccactactactacagcccattttttcaaaaccccttctcttcaattccctctccgttccaccgccactactaccctcacccaccgtaccacattcctccgtcctctcaacgccaccgcggcacccgaaaaaatcgaaaacctcggcactgaaatctccaacttaaccctcgaagaagcccgaacactcgtcgactacctccaggacaaactcggtgtctccgccgctgcatttgcccct

SEQ ID NO: 662 - DNA, 336 bp, Gossypium hirsutum
  Clone ID: LIB3493-049-P1-M1-F4
gtgaattttaccttcatttgtttttttactgtgttttagttgtagaaattaaaatatttgaaaaaaaattgtttattcatcaatttatatttgagataaccttgattctaaaaccatggttttgaatatttttcagcttattaaaagtaagatttggctggtagaaaactagtagaaaattcccgttatctatttttgtgaataatgaggattaactggtagaaaactagaagaattgtaaaatgctttggctggatcttctcgttgcggtgcctatacaaagggatcaacaactccagacaccataaaacatttcattaacatgtctcttaataa

SEQ ID NO: 663 - DNA, 592 bp, Gossypium hirsutum
  Clone ID: LIB3493-049-P1-M1-F5
gtagtttccaatcttatgatgaagaagagtttcagcatggattgcttgtcttcctctccctctccctctccctctccctctccctcttctttgtcatcttctagagtttccatcgatgaaaattctgataaaacttccattggttatctatctgatggtctcatgggccgatatcctgacagaaaaaaaggagttccatggacagaagaggaacacagaatctttctaatagggctggagaagctagggaaaggagactggagaggcatctctagaaactttttgacaacaaagactccaacccaaattgcaagccatgctcaaaaatattttcttccacaagcaactctcaacaaaaaaaacccaccttcccacctgttttaccttgtttaaaaccacatacttggtttgaccacctattcttactaaaaatcccttaactccatttgcatcatcctcatcccattccttttgattgcactaattctcaaacaaatatttccccttattttaaacttacacttacccccccaaagccccctttaaaaaaaaacaaatcattcccaacaacaacaactctgcttattatacc

SEQ ID NO: 664 - DNA, 357 bp, Gossypium hirsutum
  Clone ID: LIB3493-049-P1-M1-F7
gaaagaagctgctgagatgaacaagaggtcattcaagtatgcttgggtgcttgacaagctcaaggctgagcgtgagcgtggtatcaccattgatattgccttgtggaaatttgagaccacgaaatactactgcactgtgattgatgcacctggacaccgtgactttatcaagaatatgattactggtacgtcacaggctgactgtgctgttttgattattgattccaccactggtggttttgaggctggtatctccaaggatggtcagactcgtgagcacgcattgcttgcttttacccttggtgtcaagcaaatgatttgctgttgcaacaagatggatgccactacccctaaata

SEQ ID NO: 665 - DNA, 365 bp, Gossypium hirsutum
  Clone ID: LIB3493-049-P1-M1-F8
gcaaaacgcaatttggtatatgggaattacacgatcttctgtctctccaatccttacattttagtccttcgccaaaaccttacaacaacgacaatgttgcaagaaagacacggcgatggtccaccccacggcgtaatactagcagtggtcgtatttatcgtggtattagctccgttcttatacggtgaccaaggtgaagctatcactgaagccatttccgagctattgactccactcggtctcctcctcttgcccatcttcctcctcctcgcaatccagttcctttcctccgatcgtggctcctttgtctccggcgtgttctccaccggtgaacccgacaccatttacggtctaagtggcttccc

SEQ ID NO: 666 - DNA, 314 bp, Gossypium hirsutum
  Clone ID: LIB3493-049-P1-M1-F9
ctctcttcctcttcttcacttcattcctgctctgtttctcagtgggaaaaagaaaaaaagtcatagagcagagcaatggtgcccattttcgcttctttctcttttttactcatttctgctctcttcattgttgcagactgtggttctattggagtaaactacggaagaatcgccaacaaccttccttcagctaccaaagtagtggaactacttaaatcccaagctttaaaccgtgtcaaagtctactacactgacccggctgttctccatgcattatctggatcctgaatcaaagtcaccttccacctcccaaa

SEQ ID NO: 667 - DNA, 238 bp, Gossypium hirsutum
  Clone ID: LIB3493-049-P1-M1-G1
cttatatggagtttgcactagctgcattcctctgtacatctcagctaaaacatactcatacttgaagccctaacttggtgctgagactctaccatttggtaccctagtaatcatgagtcattgaatcatgattaacatcaagatgggacgcgtgtgctatgtcaatgggttgctgaacatggttgatgcctatctagatgcaactggcgctaaagcttctattgctaaaacttacatg

SEQ ID NO: 668 - DNA, 299 bp, Gossypium hirsutum
  Clone ID: LIB3493-049-P1-M1-G10
gaattaaacctccattttcttttgtttttttttttccttggtttcttattgccatttgtgcctttttttttcattacaagaaaatggcattcagtgggacgacagagaaatgcaggtcttgtgataagactgttcatttcattgaaatggtatctgttgatggtgtaccttatcataagacttgttttagatgcaaccattgcaaaagccttcttgtgatgggcaaccattgtcaaaaggaaagaaacctttattgcaagcctcacttttaaacaattctttaaaaaaacccaaaatta

SEQ ID NO: 669 - DNA, 304 bp, Gossypium hirsutum
  Clone ID: LIB3493-049-P1-M1-G11
cacaaattccactaatcccacagagcccacaagtcccacaaatcccactaatgccaggacagtcgggatgtgagagtggggagtgttaccgtcagggttgcggtgggacttgtgctgagtgtggtcagcccaggtgcgcatcaggatgttgccaggctgaaactgtaaagagcaaagggatagaagaggttatggacagtgaacccagtccaccaaagtagggagatgataccatattaagatgaaataatgaggaagagttggttgtcgtcgtattaattatacaaaataagaagtaatgatg

SEQ ID NO: 670 - DNA, 349 bp, Gossypium hirsutum
  Clone ID: LIB3493-049-P1-M1-G12
aaagcctccacctctcctgctcctgcctcctcctcttcctcttcctttgctgttcctaaaatttcgttctctcttagctgcctgaccgtcctatttttccctctctcgtgactcgttcatcaggaaaaacttgtttgagtgagcatcaatggatccacaacctgaacctgttacctatatctgtggagactgtgggcaagagaacacattgaagcatggagatgtgatacaatgccgggaatgtggttatcgcattctttacaagaagcgaacccgaagaattgttcagtatgaagctcgctgaaagtggtgtttggagaaagggagggtatgagcaaacaatctctta

SEQ ID NO: 671 - DNA, 297 bp, Gossypium hirsutum
  Clone ID: LIB3493-049-P1-M1-G2
ctagcactcgaatgactgtctctgggactcccttctccaagtaaaaactttcgcttctcttaagagcctccgttgcaatagtgtgagcatagatgttttttgcttttggaataaaagaaaacttaatctcctggtaacaatttttccggttccgaatatctctgattattgctccaatgaccgatctatctgtaatggaacttttacactttttgataactgtttttgcatcacccattatctctattttgttgattcccaaattaatacctagagtgattgcttgtaatcctgcat

SEQ ID NO: 672 - DNA, 286 bp, Gossypium hirsutum
  Clone ID: LIB3493-049-P1-M1-G3
ctcaacctttccttccttacaaataccatcaatggcgatttctgggctttatcttctttttctaaatctcttctcttatgggacgattctgtcttcagcgacgctttttacactccaaaaccattgcagtttcatggtatggccaggttcactctccggtaacggtgctgcgattggcgagggtggatttgttttggcacctggttcatcaactcaatatcaggctccacctggctggtccggtcaattctggggtccaaccggctgcacatttgacaacctctgc

SEQ ID NO: 673 - DNA, 107 bp, Gossypium hirsutum
  Clone ID: LIB3493-049-P1-M1-G4
tgggttttcaggtggcatacaagggccgggtgttcctatagatgagcctcatcccttgaatccatcacgagtttgagatggccctatcattgcaactgccagccttt

SEQ ID NO: 674 - DNA, 163 bp, Gossypium hirsutum
  Clone ID: LIB3493-049-P1-M1-G5
gaagattgccaaaactgctgtcatgtttttaccgccggagtttcctatcaggcaagcatggtcgagttgaaaagttgatgtctgtgtcacttggaaggcgggatgagattctgactgaaggagcaacctttgaagacttctggcacagagatgtggaggagtc

SEQ ID NO: 675 - DNA, 318 bp, Gossypium hirsutum
  Clone ID: LIB3493-049-P1-M1-G6
cccacgcgtccgcttcaggtggcctccttggttggttcactgggggtcagtccaactccataccatcactagattttcctctaccaggtgtagctctaccatcttcattgcctgactatgttgaacctggtaaaactaagattacaactcttccaaatggcctgaaagttgcttcagaaacctcagcgaatcctgcagcatcaataggattatatgttgactgtggttcaatctatgagtcacctgcctcatttggggtctcacacctgcttgagcgtatggccttcaagagcacaacaaaccgcagccatttgcgga

SEQ ID NO: 676 - DNA, 321 bp, Gossypium hirsutum
  Clone ID: LIB3493-049-P1-M1-G7
aaaaaaaaactcagtggctctgttgggtttctcccaacccattctttgcgccactaccaaccaaggccatcccacgcccttggtcacctcagtctccgatcaccgctgagaaaggcgcaccgtggcggcaccgtggcggcaccgtccgtgctttttcactctacatgcgtgctgtgagtcttccacctctttcactcagctttatacccttccatttcccttctcttcactataaccccacctgctattattctccattcaccagtgcttactcacttcatctcactatcttgtctaactaaacttaactccttttattat

SEQ ID NO: 677 - DNA, 272 bp, Gossypium hirsutum
  Clone ID: LIB3493-049-P1-M1-G9
gggagatttaggagccctcggaaactatcccggttctccttttcttccctctgattcagaaattttgcttgattcttcggagcaagaggatatagtggaagaatttttcgtcgattccatccctggacagccgcgctctccatccgaagaagaaaaatcctagaccagggtgagtgtttttccttatgatcttaaaatcgataggttaggatagagccagattgataacaaccattttatacatctattcactctgtatttcaactcgttac

SEQ ID NO: 678 - DNA, 388 bp, Gossypium hirsutum
  Clone ID: LIB3493-049-P1-M1-H1
aaaaacaataaatttctccatcacagaagacagaaatggaagacggcgaacagagagagtggggtgcaaaggcgtggacctacctcagctcagtccgctctctatcaccgttaatccagtgcatcactaactttgtctccatggatctaacggccaacactctcttatccgcaggtgcctctcctgccatgctccattctcccaacgaatccccagatttcacccctcaagtcaacgctctctacatcaatgtaggaactctctccgacaactggttaccggctatggaactcgccgcccagttggcttttcaagtgaataaaccctgggtcctcgaccctgtcgctgccggtgcctcccgttttcggttgaaggcgtgttttggatc

SEQ ID NO: 679 - DNA, 364 bp, Gossypium hirsutum
  Clone ID: LIB3493-049-P1-M1-H10
gtctctctcgcctgccatggcttgtcctctcaatttcatcttcttcttaaaccctctccttcactcttccccatcttccctttcttcaatcaattaaaatgtcttcaataaccaaacccatatccatggcggactcatgttgcctcgtttgtatcccttcactattcaccacttgttccaaatccccatctatcctctcctttcccccaaaacgcatcaatcttttgttctcatcttcccattcttcaacctctttgaccctcaaaaccaaaacccatttctcttctctagtttcctttgttgcccaaacatcagattgggctcaacaagaagaagaaaatgacgccaccatcaccatcgatga

SEQ ID NO: 680 - DNA, 357 bp, Gossypium hirsutum
  Clone ID: LIB3493-049-P1-M1-H11
gcgagaagtgtttcagtttggttggctttgtccgcaatcttatgctctgtaacggcgatctcagctgaacagagcagtgaaacgaaggactttgttttgactttggatcattccaacttcaccgacactgttagtaagcacaaatttatcgtcgtcgagttttacgctccttggtgtgggcactgtaagaatcttgctccagagtatgagaaagcagcatctatattgagtaaacacgaccctccagtcattcttgccaaagttgacgccaatgaggaagcaaacaaatatctagcaaatgaatatgaagtcaggggttaccctacacttagaattttgagaaatggaggaaagaat

SEQ ID NO: 681 - DNA, 309 bp, Gossypium hirsutum
  Clone ID: LIB3493-049-P1-M1-H12
gaagcaagcagtgatggccataggggttgatgatcagcccagcaaaggatctttacagaggatcggcgaggttcctgccattgaagagtttgttttcctcaagttgtaggttgacagtaccatttggcatatccttttcttgggttacaaccctgtagtactaaaaaattttgaaaatctgtcattgattgtgttctgtctcggataagaaagaataatttcgttgaacttgagtgattcagattgtgattaatatatattttcagatgaacttaagtgattcaaattgtgatcaaatatgtatttttg

SEQ ID NO: 682 - DNA, 156 bp, Gossypium hirsutum
  Clone ID: LIB3493-049-P1-M1-H2
gggagatataggagtctttcaaaagtctgagggctgtgctaaacttccttctgatacacaaatttcggttgatacttctgagcaagaggatatagcggatgaattttccgtagattacatacttggacagatgggctctgcatcctgagaagaaaa

SEQ ID NO: 683 - DNA, 350 bp, Gossypium hirsutum
  unsure (1)..(350): unsure at all n locations; Clone ID: LIB3493-049-P1-M1-H3
cggacgcgtgggcaactttacagtttgatttcaatttccgaaggatatagattttttgttttgaaggtttggtgaaaaatggacaagaatttgatggacaaagtttctgcctttggtgagctcctgaagacagaaggagccgaggtgggaagaaagatgagtgctggcatgagctcggttagctttaaagtgaaggagctcttccaaggccctaaccctgctgataagcttgtcgacgatgccacctcagaggcccttgatgagcctgattgggccttgaatctcgatatctgtgacatgatcaaccatgnaaaaaatagcagtgttgaactgattcgtggcataaaacg

SEQ ID NO: 684 - DNA, 254 bp, Gossypium hirsutum
  Clone ID: LIB3493-049-P1-M1-H4
catcactgcccttgcactcggatcatacgagtcaatcaaaatccccaaaaaaatattaaaaaaaatgagctctcagattttcagatctgcttctagagccgccaggtctctcctttcagcatccaaggcttctcgcttttactctgaagggcgagctgtagctgccgctgcagcagtttcacttggcgggaaagtgcctcttttggcttcagcttatggaagtactgcttctgccaatgcatctagagcatggc

SEQ ID NO: 685 - DNA, 354 bp, Gossypium hirsutum
  Clone ID: LIB3493-049-P1-M1-H5
cgaaagggctgaaaagatcatcggcggcaggattgaaaataacattgagatcgattcgtgaagggaggaagcaaactctggctgaaagcctgaagaaagaatttagactaacaatgaatatattacggaccacaatctctgcagatgtctacgagggtatcagagccctcaccattgacaaggataatgctccaaagtggggcccaccaattcttgatcaagtggatgatgagaagatagacctactatttcagccatttacagaagatttgcagctcataggttccaaacaagaatattgccattttatgtgaaatcggaaatacccctaccttagatattctaaaaaacgaa

SEQ ID NO: 686 - DNA, 367 bp, Gossypium hirsutum
  Clone ID: LIB3493-049-P1-M1-H6
ggccggcctttttttttttttcaaagtgggggaccagacacaaagcaaggaacatgaagatatatagaaagatactacaatggtagctttattactttgcttttactttttcttttataaattaagtggggtttatctattaggatttgagagagggagatgaatcaaaagatgagaaggcctgatgctcagcaatatgaacaaatagggttgcacatgctacactcccaaggatccccactttggtcttaggttcaataagattttatattagacttcacatttagaaaccctgaaatttattttgtttatgagtgaataactgtgccagtataataaaagctattaaggtgggataggataggat

SEQ ID NO: 687 - DNA, 139 bp, Gossypium hirsutum
  Clone ID: LIB3493-049-P1-M1-H7
cggacgcgtgggcggacgcgtgggctatattgccgatgtttctgcatcaacgataataactatgccgattggccatctattcctcctattccagataacttgatggtggagggggattcttatcctataactaatcctc

SEQ ID NO: 688 - DNA, 296 bp, Gossypium hirsutum
  Clone ID: LIB3493-049-P1-M1-H8
attccagctatcctacgcacggaaggtatccggtgcacgttagcatcaccaccaaccaaaagcaacgactagcgccaccaccactgccgtcgcagctaccatcatggctactcactctggacctccgccaccaagaccacttgacctcgacttgacgatcgtgtcagccaagcatctaaagaacgtcaactggcaaaacggcgatctaaaaccctacgcagtcttctgggttgatccagaccgacgtttatcaacccggtcggacgattctggctcaactcgacccgtctggaatg

SEQ ID NO: 689 - DNA, 289 bp, Gossypium hirsutum
  Clone ID: LIB3493-049-P1-M1-H9
ctctctgtttcctttcttgagatacaatttcacatggctggtcttcagtataattttttccccacagatttcttctaccctcgtccgccacagcctgctcctgtcctcgactctactcctccctccacggggccgatccaaaagagagaggttgttgttgatggtaataatgacggtaagcagcggcagcctggaactccggttgttcaccgccgcaacaacaagactagcgtttcgatgaggaggaggcaaggcgaaaaggtcggtagtactagtattgacgttcaaa

SEQ ID NO: 690 - DNA, 362 bp, Gossypium hirsutum
  Clone ID: LIB3493-050-P1-M1-A1
tcggcgaagaccttaatcgtcttcaagtaccgtttgattaaccagcaacgaaaagaaaatcaatggctgcgatcttcgctcgcaactctctcaccgctctcagagctcgacatctcgctttgtcagggcaagcgttgcagggttcatcacaacactatgggctgcgactcggtgcacactcctatggcaccatggaagatgatgaagaaagagagcagcttgcaaaggagatttcgaaggactggagttctgttttcgagcgaagcataaacacattgtttctaactgaaatggttaggggtctcatgttgacactcaagtacttctttgaaagaaaaagtactattaactatccttttgag

SEQ ID NO: 691 - DNA, 319 bp, Gossypium hirsutum
  Clone ID: LIB3493-050-P1-M1-A11
tgaaaggtttgaggccatatatcccacagtaaaggaagtggctcttgctggttctcacggaagcaaagcgatgaaacaagtgtctgtgcagatatttcattttgctttcaaagcggccggtgacggcactcctgagttgtccaaagaagcagccggaatagtcatatggtctttgaaccagaatgccgaatgctacaggatttgggagaaggcttatcttgacaatctagaagcaagtgttgctgttcttagaagactttcggaggattggaaacaacactcggcaaaacttactactcttgatcctttgagggaaact

SEQ ID NO: 692 - DNA, 338 bp, Gossypium hirsutum
  Clone ID: LIB3493-050-P1-M1-A12
gtttcaatgggaaacctatggttcctcaacctactcttgcctttgtttcttcttcagttgtttcctattttggttgtctcaaaaccctatgtttttcctgaaaaatacttcatcaactgtgggtctgattcttccctcccactgggcagtaggaaatttgttggtgacatgtacccaaactcctcctctgtcacaaatggcaaaactgtgaaagacagcagccagcagtcatcgttagactcgggtctgtatcaaacagcaaggttttcaggacaccacttttcctatgatctcgatatcactgacaaaggcctgtatgtggtacgccttcatttctt

SEQ ID NO: 693 - DNA, 262 bp, Gossypium hirsutum
  unsure (1)..(262): unsure at all n locations; Clone ID: LIB3493-050-P1-M1-A2
nataaactaatataaaatatttcatgccgattttgcattttggagcgaaaattgttgcgagtaatgcaagacatccactcgatcgaaggtggctgcatattcagcggcngtggccgtggaggtggangtggangatgaggaaacaaaaggttacgatcgcaccaccattacaaccatcaagctctcaagtgtcctcgttgcgattctctcaacacgaaattctgttactacaacaactacaacctctctcagccacgtcatt

SEQ ID NO: 694 - DNA, 231 bp, Gossypium hirsutum
  Clone ID: LIB3493-050-P1-M1-A3
ggaaccacaaagaagatgaagatgggtagagaaattgcagatgctagcgggaagacattgccagtgcaggaaatcctgaccattgatatcaaacctggttggaaaaagggaacaaagattaccttccctgagaaaggatacgaacaaccgaacacaatccctgcagatcttgttttgataatagatgaaaaaccccacagcacattcacacgcgatggcaatgacctggtt

SEQ ID NO: 695 - DNA, 228 bp, Gossypium hirsutum
  Clone ID: LIB3493-050-P1-M1-A4
ttttacaccacgataactcgtgcaagggtggaggagctcaacatggatctttttaagaagtgtatggagccagttgagaagtgtttgagggatgctaagatggataagagcagtgtccatgatgttgttcttgttggtggttccactcgtattcctaatgtgcatcagttgttgcaagacttgttgaacgggaaggagctgtgcaagaacattatttctgataaggcc

SEQ ID NO: 696 - DNA, 88 bp, Gossypium hirsutum
  Clone ID: LIB3493-050-P1-M1-A5
gtttggacctatttagaacggtgggtgtggagttcgaagtcagaagggattctgttttggtccggagcaattcgatcttacaagttct

SEQ ID NO: 697 - DNA, 299 bp, Gossypium hirsutum
  Clone ID: LIB3493-050-P1-M1-A7
atcaagcgcaactgtgaagcaacggccaactgataatgatcgatacgttaagaactgtcggaatgggagatctcccaaggagacgagatggtggttccatgatgataaagtgtaatattttagaactgttatctatctcttataactgcgagggtttcatcaggagagatgggaaaaggatggccctccctaaatgctgtggtaaccttctaaatttgcctttgttgctgtgtatgaaattgtgaatcaaacatagatttaatttgaatgtggctgcctccttcaagcagcggagtagg

SEQ ID NO: 698 - DNA, 309 bp, Gossypium hirsutum
  Clone ID: LIB3493-050-P1-M1-A8
atctttaatgcctcagctgctctttctctgtttcgactctgtggagtaaatttgggatcgatggcggccttgcagtacctagactctcttcgaaatgagcatccagagctaggcgactggtataattctcttgcagatctgtataaaaagaagctctggcaccagctcactctcaagcttgagcagttcgttgctctcaccgttttccaggctggagatgcgttgataaaagtgtatcataacattatcactgactttgagacgaagattaatcctctcaagcttgcacatttcgctggtatagtttct

SEQ ID NO: 699 - DNA, 254 bp, Gossypium hirsutum
  Clone ID: LIB3493-050-P1-M1-A9
tttagaaaaaagaatctactgcggctccaaatggcccttcgatcattagccaccaggaaaaccctaaccttggctctcaagtccaccaggttggctcagtctcgagccttgcagacattctcgctccccgatcttccgtacgactatggcgcactcgagcccgccatcagtggagagatcatgcagctccatcaccagaagcatcaccaaacttacatcactaactataacaaggctttggagcagctccatga

SEQ ID NO: 700 - DNA, 328 bp, Gossypium hirsutum
  Clone ID: LIB3493-050-P1-M1-B1
gctcctgatcctgttcatggaaaaagaaactatacttacatggatgttgttagagcttatttaagaggaagaaaggttcagctttgtggattagctcaatatgcaaatcttcttggtgtaaccattggttatacaattacagcatcaattagtatggtggctgtgaaaaggtcaaattgtttccacaagcatggtcatcacgtgaagtgccaaacgtcaaacaatcctttcatgatcatctttgcttgtattcaaattgctcttatccagatcccaaattttcacaagctttcatggctttcaatccttgctgctgtcatgtctttta

SEQ ID NO: 701 - DNA, 301 bp, Gossypium hirsutum
  Clone ID: LIB3493-050-P1-M1-B10
cttggagcgtctctctgttgactatggaaagaagtcgaagcttggtttcaccgtctatccttcacctcaagtttctacatcagttgtagagccttacaacagtgtgctgtccactcattcactccttgagcacactgatgtcgctgttcttctcgataacgaagcaatatatgacatctgcaggcgttctttggacattgtacgacccacttatacgaatcttaaccgccttgtctctcaagttatctcatctcttaccgcatctttgaagtttgatggagccctgaatgtggatgtgact

SEQ ID NO: 702 - DNA, 213 bp, Gossypium hirsutum
  Clone ID: LIB3493-050-P1-M1-B11
agaaaacatagggaaaggagctgggccgggaaacctgaatttttagggattgtttcttcttttttttgtaaaatttggtgagagaaagataagatggtggcggacaaaggaaagaaggtgaaatttacagagaatggagaagaagagaactctgaacaaatcgataaagacctcgtcctttccattgaaaagcttcaagagatccaagatgag

SEQ ID NO: 703 - DNA, 324 bp, Gossypium hirsutum
  Clone ID: LIB3493-050-P1-M1-B12
aaaaaaagaccaagtgaaggcgtggccactcgcaaagaccttaactttgactctcgcatgtcgtttctttttaggaatcgatgaaccagagcgtatctctaggcttgttaaaagattcgacgatataactttggggatgcattcgattcctttggattttccggggacagctttttacaaagcttataaagctgcggcagcgatacggagggagcttaaggaggttataaaagagaagaaagctgctatggtgacgggagttgtcatgcaagatatactttgtcatatgattggggccaccgataagaccgggaaatacatggc

SEQ ID NO: 704 - DNA, 146 bp, Gossypium hirsutum
  unsure (1)..(146): unsure at all n locations; Clone ID: LIB3493-050-P1-M1-B2
ncaatgtgacctagtcccctcataggtgaaagatgactaccaaaaaataaatccaaaaatcctaatataaacatccattaaagaacccgacccggtgaccccgaatgggggcgcatagaacagatgatgacttcgactacttattc

SEQ ID NO: 705 - DNA, 268 bp, Gossypium hirsutum
  Clone ID: LIB3493-050-P1-M1-B3
ttggcaattgctgtgtgtgagagagagagtgagagtaatagtagtatcaataatttggcttaggttgcatctctgtgtctgatgcaacagagaggaaggactaacaaccgtagatcaagggctttctccagatctcggcttgctgtcgaaagattttagttccccttttcactccccattaaaaaataaaaaaaatatctgaaaaaaaaatcaattcctctcagagctcactagagatcttctctgttaaccatggcggctaacggtt

SEQ ID NO: 706 - DNA, 316 bp, Gossypium hirsutum
  Clone ID: LIB3493-050-P1-M1-B4
gtcgactcagatgaccttcctttggacatgtcaagagaaatgttgctgcataacacgatcttgaaggttatccgcaagatcttggtaaagaagtgcattgagctcttctttgtaatagcagagaacttggtagattacatcaagttttatgaggcattctcaaagaacctcaagcttggtatccatgaggactctcagaacaggactaaaattgccgaattgatccgctaccactccacctagagtggtgatgagctgaccagctagtatgactatgtgaccagaatgaaagatgggcagaatgatatgtactaca

SEQ ID NO: 707 - DNA, 51 bp, Gossypium hirsutum
  Clone ID: LIB3493-050-P1-M1-B5
catagatcgagtcttttatctcttgctgtaacgaataatacgcgggctatt

SEQ ID NO: 708 - DNA, 183 bp, Gossypium hirsutum
  Clone ID: LIB3493-050-P1-M1-B6
ggggcgcccttccgcttcgggctgtgagggcgggtcaaaacgcgaacttctccttgccatgagctgcctttgcaagggaaacccagatgcgttattggtctgcaatggtttcaaagatgctgagtacattttccttgccttgctagcaaggaagctcgcgttgaacactgtaatggttcttga

SEQ ID NO: 709 - DNA, 332 bp, Gossypium hirsutum
  Clone ID: LIB3493-050-P1-M1-B7
cttcaagaagcttttcaacttcaagaaagacagagatggttactggaaatggtttgctgggaacttggcatctggtggtgcagctggtgcttcttcccttctctttgtctactccttggattatgctcgaactcgtcttacaaatgatgcaaaggctgcaaagaagggaggagagagacaattcaacggttttgttgatgtctacaggaaaaccctaaaatctgatggtattgccgggcttttaccgggtttcaacatttcatgtgttggaatcattggttaccgggctctatattttggaatggaccactcttttaaaccagggcttttga

SEQ ID NO: 710 - DNA, 254 bp, Gossypium hirsutum
  Clone ID: LIB3493-050-P1-M1-B9
attttctctctaaaaagtggagcaaagaatccttacatcaaacagatggcaaccatggagaaggggttagagtttgagaacaagaatttaggcctgaagcacctaaacttcgtcagggtggctacgatccacgccttggtttgcatctcgaacctttacaattactctaaacagaactcggggccgttgagatccaccgtcgacgccgtcgagcgtgccgttaccaccgccgtcggtcccgtctacgggaaatt

SEQ ID NO: 711 - DNA, 190 bp, Gossypium hirsutum
  Clone ID: LIB3493-050-P1-M1-C1
cccacacgttctcatacacgtgggattcgggatatttactgctttgggttgcttttgcttttcttagacgggtggtatttgttagataactggtgctaccactgattcttaaaagggaagaatttgcttagccgatgccatatttgagggataggtattggaaaggagaatctatagcgtcattcctttt

SEQ ID NO: 712 - DNA, 365 bp, Gossypium hirsutum
  Clone ID: LIB3493-050-P1-M1-C10
ctcccattttcttattgattttgcagatcggttctctaatccttttttcgggtgtagcgttgtttatacgtttggttgttgttgaagaagtgctactaccatggctacaaagaagagcgttggggacttgaaggaagctgatttgaagggaaagaaagagtttgttagagtcgatctgaacgttccattggatgataacttcaacataactgatgacacaaggatccgtgccgctgttcccaccatcaagtatttgatgggtcatggctctaaagtcatcctctctagtcatttgggacgcccaaagggtgtcactcccaagtacagtttgaagcctcttgtgccaaagttatctgaactccttg

SEQ ID NO: 713 - DNA, 322 bp, Gossypium hirsutum
  Clone ID: LIB3493-050-P1-M1-C11
cggacgcgtgggcggacgcgtgggctcagtgtgaggggtaacaatattcgctattatatcctgcctgacagcttaaatcttgagacattgctggttgaagagacaccaagagtgaagcccaataaggcaacagctggcaggcctttgggacgtggtcggggtcgtgggcgtggacgtggacgtggacgtggtcgaggccgttgaatatgttgctttgtttccaaatttttgtgacagctggctgtgtaggcagctttgttatagtgagaatttgtgggcgatgctacgaattttaaaggaattggattgggggtttactggg

SEQ ID NO: 714 - DNA, 520 bp, Gossypium hirsutum
  unsure (1)..(520): unsure at all n locations; Clone ID: LIB3493-050-P1-M1-C12
caaaaaccctaagaaaatcctgttagatcgtcattcaaacctgaaaaatgggagtagagaagcaagtcatcaggcctggaaccggtcccaaacccactcccggtcagaccgtcaccgttcactgtactggatacgggaaaaatggagatttgtctgagaaattctggagcacaaaggatccagggctgcaacctttctctttccaaattggcaagggctctgttataaaatgatgggatgaaggtgtgatgggaatgcaagtggcagaaagtgctcgtcttcagtgctccccagactatgcttatggggctggtgggtttcctgcatggggaatacagccaaactcggttctcgaattcgagattgaagtnctaagcttgaagtgaggtacatgccagtggtgactgccgagaaatatatgtagcccgaataactcacctgcgatgaacatatatagatattatgggggagcatgtgtgaatattaaatgaggatcaatatgagtcatcctattcatgtg

SEQ ID NO: 715 - DNA, 196 bp, Gossypium hirsutum
  Clone ID: LIB3493-050-P1-M1-C2
agtacgcgtacttcttaacacagggccggactatgcattaaagagaaatataaaagtgattgattattcagtgtataatctgatccataacatgattgatctactacacgactacattgtcaagtcggctgtaactaaaaaggatgacattttaactagctacctccaagtgaaagtcactgacccaaaatacttg

SEQ ID NO: 716 - DNA, 349 bp, Gossypium hirsutum
  Clone ID: LIB3493-050-P1-M1-C3
cggacgcgtgggcggacgcgtgggctgcgctagaagatactgcttggagcctttggcccatgaacccatctcaggctgctgcatctgcttcatctgttcctccaaatgttggaggaaggtttcccacaaatactggtagtttacatattaagagtgcttcgcgcactgcaaatgagggtgtagcaaatatacttgccatggctgagactgtacgggaggttttgccacatgtcccggatgaggtgatttttcaggacttgcagagaacaaattctgttacagttactgtgaataatcttctccaaatgtgaggatgcatggaattttgttggacacattggggtcgagt

SEQ ID NO: 717 - DNA, 358 bp, Gossypium hirsutum
  Clone ID: LIB3493-050-P1-M1-C4
agatgagaaggcaataatttcagtgttgggtcacagaaatgcagttcaaaggaagcaaatcaagcttgcttatgaagacctttaccaggaagatctcatcatgcgtcttgaatcagagctttctggtgatttcgagaaagcagcgtatcgttggatattggatccagcagaccgagatgccgtgtcagctaatgttgccataaagaaatcaagccctgatcaccatgtgatcgttgaaatttcatgcaccatatcccctgaagagctcttggctgtgaagagagcctatctagctcgatgcaagcattccctggaagaagatgtggctgctcatacaaagggagacactcaaaagctc

SEQ ID NO: 718 - DNA, 379 bp, Gossypium hirsutum
  Clone ID: LIB3493-050-P1-M1-C5
gaaactggaacgtttatgtaaaacaactactgtgaagactaggtacacagtgatgtgcaaggagattttagatcaatacccagaattggcaactgagggttcatcaactatcagacaaaggcttgaaatagcaaacccggcagttgttgagatggcatttgaagcaagcttagcttgcatagaggaatgggggaggcctgcaactgatatcacccatatcatctatgtctcttccagtgaaatacgcttacctgggggtgatctttaccttgccagcgagcttggcttaagaaacgatgttagccgggtaatgctctatttccttggttgttatggtggtgccactggcctccgagtagctaaagacatagctgaaaac

SEQ ID NO: 719 - DNA, 285 bp, Gossypium hirsutum
  unsure (1)..(285): unsure at all n locations; Clone ID: LIB3493-050-P1-M1-C6
gatgtattcgatgccgattacttgatgacacagatgaatggttttgtcaatgttgntaaagaattgccaccagatatatcatcaaatgaaccccatagagtttattgcagtaaacggaaaggtcaatttgattacatcgaaagtgttcgtccatccttattgaaatatcattacgtctctatcacaccagcaatgagccaaagaagggatagatatcttgtaggtacccaaattatgcaaaagctgcactttgtcaagcctgttacagagcattaaagctgactg

SEQ ID NO: 720 - DNA, 334 bp, Gossypium hirsutum
  Clone ID: LIB3493-050-P1-M1-C7
cggtggatcactggcaaacgcgatgtaaattcttaatgcaaatcattggatccgtatccgaagctgtaggtgcagatagaatcgcagtccgaatttctcccgcaattgatcacctcgacgccactgactctaatccgctcaacctaggcttagccgtgatagaaaggcttaatgagcttcaactgaaattggggtcgaaactcgcttatcttcatgtgactcaacctcggtatcatgcctattggcaaaccgaatcaagcaggcaccggagggaaaatgaggaaacccattttatgaggaccttgaaaaagaattaccaaggaaccttcatgtg

SEQ ID NO: 721 - DNA, 143 bp, Gossypium hirsutum
  Clone ID: LIB3493-050-P1-M1-C8
gtgagaaaaggatgagggaagtggagaaaagagtggatgattttcataaaaggatcattgaagaacataggagggcaagggaattgaaaaacaaagaatatggaaaggatgatgattatggcgaagaaatggattttgtcgat

SEQ ID NO: 722 - DNA, 376 bp, Gossypium hirsutum
  Clone ID: LIB3493-050-P1-M1-C9
gtggaaaggaggaaaggattggatcttggagttcactgacaggagccagtgggctattttcaaggatatgcatgaagagtgctacaaccgaaacattcgtgctgcttcagttaagaacatacctattcctggagtttgcttggtacatgactatgatgaaaatgcaactgatgtgacatttgttcgcagttctttcaagtacttgcggcaggttgaaactgatgtcgagatggctttggatccatcccatgttttttatgacatggatactgatgatgaacagtggatttcaggaattcatagatcttcacagagtgatggtagctgcagcacattggaattttctgacgaaatgtttgagaaagttatggacatg

SEQ ID NO: 723 - DNA, 311 bp, Gossypium hirsutum
  Clone ID: LIB3493-050-P1-M1-D1
tttctgttttggctttgatctctgaagatattaaggaacaagcaaagctaattgctgaggaatggaaaccaaagctggatgctcttgacatggatgctagtaatggtaactcattggaagctcatgcttttctgcaacttatcgatacatttggtattgcttctggtttcaacgaagaagaactttcaaggctgataccaatggtctctcgtcggcgacaagcagctgatctctgccgttcccttggtttatctgagaaaatgccaggtgtaattgaagttctggtgaaaaatggaaagcagattgatgca

SEQ ID NO: 724 - DNA, 345 bp, Gossypium hirsutum
  Clone ID: LIB3493-050-P1-M1-D10
cggacgcgtgggtttcaggattcgctcattcttttgccgggacccagacaaactctaagaacaagaaaatggcaccaaatgctgagaagaagccagctgagaagaagccagcggaggagaagaagacggtagctgagaaagcccccgctgagaagaagccaaatgcaggcaaaaagcttcccaatgaatgcggagctgcggccggagacaagaagaagaagatggtcaagaagagtactgagacctacaagatctacatcttcaaggtcttgaaacaagttcaccctgatatcggtatctcaagcaaggctatgggaatcatgaacaagctcatcaatgatatct

SEQ ID NO: 725 - DNA, 358 bp, Gossypium hirsutum
  Clone ID: LIB3493-050-P1-M1-D11
cacaatcgtaaacaggttttgccctaccgattggatttcaaactttttctttattttccaaatacttctcatctgcgctttgaaactatctggattgtatgatttctctgtccaaatagtacagattagagttggtttctcacttggttccaccatcgaagctttaactgataattgtattaattcctctgccagcagtgagatctcatcggccccaatccaagtcgttgccaccactttccatcgtcccaagccgcaacagccactgttcttgcttggattcttgggatagcactcttggcttctaagggtttaccaaaaataatttttccttaaattggaaaagaaaagaaaatat

SEQ ID NO: 726 - DNA, 196 bp, Gossypium hirsutum
  Clone ID: LIB3493-050-P1-M1-D12
ttcctttttctacatatactctaggtgtttgataaaagtccgatactgtttttttttgaagcgtggaggttgggtatttggttaaagtagttttgaaggggtttcgaattctgggtttaattcgttttggtgggggtaatacccaggtttagactaattgtgggcatcacggctatacacggtgtttctcgggctc

SEQ ID NO: 727 - DNA, 298 bp, Gossypium hirsutum
  Clone ID: LIB3493-050-P1-M1-D2
cttttatttcctaaatctgtcagaaattacacactagaactgtagcaatgcaagggctcgtcttactatcggagctcctttgcgccagctgccatatctccctttccttgaccaatagtactgccagcaacggtacagtggcgggcggactactggaaaatggcaacttcgaaaacgccccaaatgcaacaaacatgaaaggcaccgtggttgtgggacgctacacaataccaggatgggtgaatgaggagtttgtggaatacattaagtcggggcaaaagcaaggggacatgctgct

SEQ ID NO: 728 - DNA, 292 bp, Gossypium hirsutum
  Clone ID: LIB3493-050-P1-M1-D3
gatgattttccggttgatgggtatcttagtgatttgtctccaaattcgtgggctagcagtactgaagaagaaataagagaagggagctccttgaaattgaatttacagcttacctcatcatcatcatcctataactacgagtacataaccctcagagacctgatgttggattctaattacaggggtggtggcatttcagttataaactcactaaggactagcattgacaattgctacattgcccatttctccactaatggaattttagtccaaggcgggcacgagacctata

SEQ ID NO: 729 - DNA, 370 bp, Gossypium hirsutum
  Clone ID: LIB3493-050-P1-M1-D4
aaattgtgtccattgaattaaatagctcctcagaatcttcctactggattggttacacgaaaggaatgcaagaactgcaaaggcatattgaagatcacaatgactgcttcgaagttgatccacttaatagtatttaccctgtacttgatcggttaaagatccaacaacttttacttgggctagaggatcttaacgtatggggacgctgcaaattcagggctcctcactttctcaaggttaacagttttgatgaacctgatttggtacaaagactgcatgatgcaacattatctcttccaagtatagtgaaaccgcatgttgcttgtggcgtagctgatgctcacagtatggcaattgtctttcaagttga

SEQ ID NO: 730 - DNA, 342 bp, Gossypium hirsutum
  Clone ID: LIB3493-050-P1-M1-D5
tttagctaaagagagtttgctagatgccattctcttcataaatgaatgctcgcaatcaaacgaccctgatctctcgttgaggcaaaataaggttcctgattatgcggaacgatttgtcaagaagcagatgcgtgcagcttggttattcagagaggcagctatcaaactcgggggtgtgcactgtgagggtgatgcatgtgacatgtatggccaagataccgatgactccgagtgggaaacagcttgctaaagcgatataggaaatgatggaagggatgaaatgggcgatgaggtcgacccttatacggtaggggtggactaaaaataaaggtgctcttaatt

SEQ ID NO: 731 - DNA, 539 bp, Gossypium hirsutum
  Clone ID: LIB3493-050-P1-M1-D6
gtcaaggacaaagagttgatatctgactgcttgaaatgttgcacagaagactcagatgattctacaagtaagattacttattcaggtgcgatactggaagtttgcatgaggaaactagtattctatccggaaattgttggtttcattgaagaagagaaggacaagtttccaacagttaaagttcaatatcttttcaattctcctcccaagttgatcatgttggatgacgagggccaatataaggaaaccataagaattgacaattggaaacgtgaacacatgctgcaattcctgcagaagaaagttcagccctattccgcaagctcatagacagtcgttcacattcctgttatcgcaagataaagttaaaccgtactcagcaagattgaactatttattcgtgtaagcctgtcgttttaaatattgcttgagctactgatttctgcttaaagagagatatatgaataagagttcagtgtcaatgttacttagccaggctattagagtgtatgtatgcgtaagattaggatgatgtgctg

SEQ ID NO: 732 - DNA, 243 bp, Gossypium hirsutum
  Clone ID: LIB3493-050-P1-M1-D7
cacaaaacatgcaaacaaaggttaaatggcatggacaatggcaatggcgatcccttcacttcctcttctcttcctctttacatttctgcttctactcccacttctcatttactcttcccctgttcaagaccctgagcttgttgtccaagatgttcacagggctatcaatgcgtccaggaagaacctatggtatctctcctgtggaaccggaaaccccattgatgactgctggagatgtgaccc

SEQ ID NO: 733 - DNA, 244 bp, Gossypium hirsutum
  Clone ID: LIB3493-050-P1-M1-D8
cgagctcctgaatatcttgctatggatgcatttgtattgaacatggttcgcaattttgttaattctggaaagcctgttgcttcaatttgtcatggtcaattgatattagctgctgccggggcagttggtggtctaaaatgtactggtttccctgctgttggacctgcacttattgctgctggtgcattgtggattgaacctgatactttggcagcttgtgttgttgatgggaatatcattactg

SEQ ID NO: 734 - DNA, 177 bp, Gossypium hirsutum
  Clone ID: LIB3493-050-P1-M1-D9
gggattttaagaggttgcagcaagatcctcctgcaggaattagtggtgcacctcaagataacaacattatgctttggaatgctgttatatttggacctgatgacaccccatgggatggaggtacgtttaagctgactcttcagtttacggaggattatccaaataaaccaccaactg

SEQ ID NO: 735 - DNA, 267 bp, Gossypium hirsutum
  Clone ID: LIB3493-050-P1-M1-E1
ggaatctataaaggtattgtcatgtcaattaaagaatatggtgcctttgtggagtttaatggtggtcagcaaggtctgctacacatttctgagttatcacatgaaccggtgtctcgtgtttcagacgtagtgtctgttggccagcaaatttctttgatgtgcataggacaagatgttcgtggtaatataaaattatctcgtaaagcaactctaccccgacctgtatccgagaccaaaagtgtagttgaaggatctgctcctgttact

SEQ ID NO: 736 - DNA, 288 bp, Gossypium hirsutum
  Clone ID: LIB3493-050-P1-M1-E10
cggacgcgtgggtttttgtagtgctgcctctgcgaccaatgctttgcgtcgcattctcaatcttgacaatactgatgactgaaaagagtgtaggagtttttcagctcctgtaaataagtttactgtgcaaatttccgaagttagttttagattgtatataagttgaataagatggttggtagcatgagtcagtatgaattaatggcaatggtaggtcgacaatctccagattttgctttatgatgggttatgagaagttggtgttgggttcgagaaaatgacaagatg

SEQ ID NO: 737 - DNA, 350 bp, Gossypium hirsutum
  Clone ID: LIB3493-050-P1-M1-E11
ctaaaagatacagatataagaaaagtataggaagtccaatagttcagattttccaggttattgtagctgcaataaataagaggaagatggaactcccttacagagttgaattgttatatgaggacaccccagatgctcaaagaattcatcacacagatcagttccagttcttggacagggcagccattgttgccgaaagagatttcgaaagaaatgttgtttcatctccaaatccatggaaactttgttctgtcacaaaagtagaggaagggaaaatgatgggggggcttttgccggtgtgggccacaaccatcatattttggaccactttcgcccaaatgatcactttc

SEQ ID NO: 738 - DNA, 132 bp, Gossypium hirsutum
  Clone ID: LIB3493-050-P1-M1-E12
cgggaatgggaaaaactacgctcttgcagctactggcatgattgagcaaaccaacgtcaggctctatttttattcagagatatacagatgatggcaaaccaactcaatctccgaagtcattggttccagaaa

SEQ ID NO: 739 - DNA, 313 bp, Gossypium hirsutum
  Clone ID: LIB3493-050-P1-M1-E2
aaaaacatctttctgttcaattcaatcctgctttttctattgaaccataatgtcttgcttcattagcaaatacgccgatgagttggctaaaaacgctgcttacattggcacccctggaaagggtatccttgctgctgatgaatccaccggcaccatcggcaagcgtctttcaagcattaatgtagaaaatattgaagaaaacaggcgtgctctccgtgagctcctcttcactgctccaggagctcttcagtacctcagaggtgttattctcttcgaggaaaccctttatcaaaaaaccgcttcgggcaagccc

SEQ ID NO: 740 - DNA, 347 bp, Gossypium hirsutum
  Clone ID: LIB3493-050-P1-M1-E3
caccgcacagtggtgctaagccctcgagcagcagatcatgtcgcagatttgcatgtaagcaaatctgcccccaatttccagctggcaattttgaggttggacaagtgtcttacaagttcaatctgttgaaatcgagaggtcctaagaggatggtttgttcaatacagcgccctttgccggaagatatggctgatgagaagtatttagatgacatccagatgaaaatgcccgagcatgcctcatctggtcatacaattttgtggaacaaatctccaagatggcacgtacattttcagtgctggtgcttaaatttccacggtcgggtaactgtagcatccgtgaaaaac

SEQ ID NO: 741 - DNA, 380 bp, Gossypium hirsutum
  Clone ID: LIB3493-050-P1-M1-E4
gtaaattcctaaaactctctggctgatggcactctgcaatctctcgattaatccacaccatcgccgagtttgctcccctttagccatcaattctcctccattttctttatttcttctgtttcgtagtcaaaacttaaactgcaaccttaaacgggcgatatatatatatttattctccatcaccttgcttcttctggtaccactggattatctgttggaaagtggattttctcatgaaagtagggaggtagctaccatttggtaatcatgataaagattggggaaaaccaaaatgcaattagttatatggtggattgcaaagatgccatgccttgtaatgatggagtaaatgaaaatatgggtgatattgtggatgaaac

SEQ ID NO: 742 - DNA, 301 bp, Gossypium hirsutum
  Clone ID: LIB3493-050-P1-M1-E5
cggacgcgtggggttcagctacggagcggttgtcttagatggagctagcggcagaagaccgttcgtgacagggaatgctccggctcgtgtgagtggcaatttggtggaatgggtttggggtttacataaagaaggtaaatcgttaaccgctgccgatgcttatctggaaggtcgtttcgaggaatccgcgatgtgacgagtacttttggtcggggtagcttgttcacaccctgatccattggcttgaccgactatgagaagtgtgggccaaatgtcggtaggtgaaacggaggtcccaatg

SEQ ID NO: 743 - DNA, 164 bp, Gossypium hirsutum
  unsure (1)..(164): unsure at all n locations; Clone ID: LIB3493-050-P1-M1-E6
cggacgcgtgggttcatttctctgaatgtacttttgtctgcatacaaagttganatacccctgagcatttgatcccttcacgggttttggtgggagctgttaaaggttgtttattctaatggggaatggcccaaaaaacaactgcatgtcagcatcccacaagc

SEQ ID NO: 744 - DNA, 333 bp, Gossypium hirsutum
  Clone ID: LIB3493-050-P1-M1-E7
ggtcaaaccaaagggagtggtcaatgaggcagtagagcaaattgcttatgctgaccgcataattgtaaacaagactgatcttgttggtgagccagaaattacgtccctggttaagcggataaggagcattaatggtatggctcatctcaagcacacagagtttggaaaagttgacttggagtatgttcttgggataagaagctttgatttggagaagattgagagttccgtcaatgatggtactaaagaagatcatgctcaccatcatgatcatgatcatcaacatcttcatcatcatgaacatgagcattaacatgaccatcatcatgatca

SEQ ID NO: 745 - DNA, 346 bp, Gossypium hirsutum
  Clone ID: LIB3493-050-P1-M1-E8
cgaattggggggaagtgtgcggatacaaactacttgtttatgggagattatgtggaccgtgggtactattctgttgaaactgttacgctgttggtggctttaaaagtccgctacccccagcggattaccattctcaggggaaatcatgaaagtcgccagatcactcaagtttacgggttttacgacgaatgtctgagaaagtatggtagtgctaatgtttggaagatctttacagacctttttgactattttccattaactgctttggtggagtcagaaatattttgtctgcatggtgggttgtccccatcaattgaaaccctggattatgtaagaaactttgatc

SEQ ID NO: 746 - DNA, 365 bp, Gossypium hirsutum
  Clone ID: LIB3493-050-P1-M1-E9
caaatccaagagatacaggaaagaaccaatgagatcccggatgattactttgttgttttggttggtgatatgatcacagaggaagcccttccaacttaccagacgttgcttaacaccatggatggaactagtgatgaaacaagtgcttgccttactccttgggccatttggacgtgggcatggaccgctgtagaaaacaggcatggcgatctacttaataagtatctctacttgtccggaaaggtcgacatgaggcaaatcgagaagacaatccagtatttgattgcttcaggaatggactcgaaaagcgaaaacaacccatatctgggagccatctacacatcattccaagaaagggcaacttt

SEQ ID NO: 747 - DNA, 356 bp, Gossypium hirsutum
  Clone ID: LIB3493-050-P1-M1-F1
tgttgggtgctgaccagcccgtgatccttcacatgcttgatatcccacctgctgcggaggctttgaatggtgtcaaaatggagttggtggatgctgcttttcctcttctaaagggtgttgttgctacaactgatgttgttgaggcatgcactggagtcaatgttgctgtcatggttggtggtttcccaaggaaggaaggaatggagaggaaagatgttatgtcaaagaatgtgtctatttacaagtctcaagcttctgccttggaacagcatgcaactcctaactgcaaggttttggttgttgctaaccctgccaacaccaatgcattgatcctgaaggaatttgcaccttcaatc

SEQ ID NO: 748 - DNA, 313 bp, Gossypium hirsutum
  Clone ID: LIB3493-050-P1-M1-F11
gacttggcaacagtagactcaatcatactgcgggagcttccaccagttgatgacgctgatgctcggctggctcttaaaatgttgatagacataagcatgggtgttattacacctttatcggaacagctaacaaagccattgcctaatgctatggctctagtaaaccttaaggaactatcaactggagcttacaagcttttgccttgaagtacacgcctggttgtatctgtacgtggggaccagtcatatgaagagccggaaatcccgaaagacattgatgcttcaatgcctcttcataatataccctttgatg

SEQ ID NO: 749 - DNA, 304 bp, Gossypium hirsutum
  Clone ID: LIB3493-050-P1-M1-F12
gcgctatattaataagccaagagatgatggacgcgagtcgagtttcagcaaacatgttccttgaaatgctgtgcggctcattttctgatatagcgagagctgctatagagctgaccaaactgacatactctcaaccagccttctgaggaattttttgtgtactcccgggcagcatgtcgagattactcggtccgttattgttccaagactatttccattgccaactcgtgcaagatttgagcctcagagttcccaaactcaaaatgtagcaagatttgatggaaattgtttttgacatttcaac

SEQ ID NO: 750 - DNA, 360 bp, Gossypium hirsutum
  Clone ID: LIB3493-050-P1-M1-F2
ggagtctctcttggtgcggttcacaaagtgggcgattccaccggctggactagtcttgggaatattgactacctcaagtgggcttccaccaagaatttccatgttggcgactctcttctttttcagtacaaccctcaattccacaacgcgatgctagtgacccacgacgatttccagtcatgcaacggaacatctgccatcgcctcctacacctctggatccgactccgtaaccctcaaaaggcctggccacttttatttcctttgcggtgttccaggccactgccaaaccggtcagaaagtcgacgtattggtcaaatcatcgtgcaaagccccaattgcaagtgctagcccatccact

SEQ ID NO: 751 - DNA, 376 bp, Gossypium hirsutum
  Clone ID: LIB3493-050-P1-M1-F3
cgcggattatgacccgcaaacggaatattgctgcgcctctggaccctgcatcatttgctgatgcagttgtccagatctatttggataatgctggtgatctggaacttgttgccaagaaccttgaatcttctgatcttaacttctcaagatacggtgacactttctttgagggtgttttcaccgggggccggacacatcctggcacaatcaaacctgatgagggggagcgccacccttactctgtaatagagtgtgaggctaaacgtgaagccattttgccatctgtgatctacatacagaaaatcttgcgtcgaaagccttttctgataaaaaatcttgaaaatgttatgcaaagattgttgcagtccttggagct

SEQ ID NO: 752 - DNA, 285 bp, Gossypium hirsutum
  Clone ID: LIB3493-050-P1-M1-F4
gtaagaaagagacaccgctgaatgcaattttagcaggttgcattgcatgattgtcgattttagctctggatgatcccaatcgaaggcgaacactttcattgtatctttaggctagagtagctcagtgtgtttataattctgcgaaatcgaaaaataagtttcatttatggggaagccattggaggcatggtgactctctactcttttctttagcttgggcccaggttatgtacgcctttgtgatgcgtccttgatgcctgccaaaatcatataaagattttattc

SEQ ID NO: 753 - DNA, 357 bp, Gossypium hirsutum
  Clone ID: LIB3493-050-P1-M1-F5
agaatctctactttcagaaaatcgtcaactgagagatgcactgtttgatagtaaaaaggaagttaaccagctttcttcacaactttctgatgccataatgaaaatctcagagcagtctcttgttgaggaaaacttacttagaagggtagaaagcctcgagtccgcggttgaggatgcacatattgaagctaccatttgttgggatgtatataatttcttgttcaggggggcaatcagccaggtaaagtgcatggctgaagattcagagatggagcacaatatcatgaaaagaaatttatgaccctatattaaaagatgcttcttgcaatatgtcacatgccagaaagagtggatttg

SEQ ID NO: 754 - DNA, 447 bp, Gossypium hirsutum
  Clone ID: LIB3493-050-P1-M1-F6
cgaaggttgcggaagagacatgtgagattgggacataagattcaagattgcgttaggcctggcggaagggttagcctatttgcaccacgattgcgtgccggccatcatacaccgagatgtgaaggctcataatattctgctaggagactattacaaaccctacttggccgattttgggctggctagattgcttgaggacgaaaacggttcctccttcttcgccaaccccgagtttgcgggctccttcggtttcatggcaccatgttagcaccctgggtcctgtactctaaattttttttaatggaactattaaattaaattaaatttgggggtttatgccataatcatgatttaaatggtaggaaatggggatgtggacaatatgaaatgattggatgggacttaaagcaagctttcacttttttacgtgctaaattacttggaatt

SEQ ID NO: 755 - DNA, 349 bp, Gossypium hirsutum
  Clone ID: LIB3493-050-P1-M1-F7
acaaaatcaactgcttcacaatggcctctacaaccatggctctttcttccccatcattcgccggtaaggcagtgaagttctccccttccacccctgaaatccagggaactggccgtgtttccatgaggaaaaccaccaagcctgttccttctggtagcccatggtacggtcctgaccgagttttgtacttgggtccactttccggtgagccaccatcttacttgaccggtgagttccctggtgactatggttgggacactgctggactctcaactgatcccgagacctttgctaggaaccgggagctcgaagtcattcactgcagatgggccatgttgggagctcttgg

SEQ ID NO: 756 - DNA, 329 bp, Gossypium hirsutum
  Clone ID: LIB3493-050-P1-M1-F8
attatgatgatcaaaatggttatggaagagaccgggaatatggctattgagatgatgatcggtatggcagatatgggattcaaacagtcgtgatggagatcggtatggcagagattatgaagaacgctacggcagagatggtgacagggatgatgactaccgagggtgaagtagaagcgttgatgattatcaatacggcacaatgatcttggagctctgattgagaccgcgctttctacgaagatggggcttattctcggcgggatgagccggaacaatctgaacaaaatattggggggccccctagggttgaacaatcagtgagtgag

SEQ ID NO: 757 - DNA, 326 bp, Gossypium hirsutum
  Clone ID: LIB3493-050-P1-M1-F9
gcgaagaatttgacaaatccaaattgcgtcctccttacgacccctttaacaagaaaccggttatcgaagaagtggaagaccccaaaaacctgctacaagtgttccacaatatgagaggagacagcctaatcaacaatgctggtaagatgttcgatgcattgtcaaaagacggactgacccatgaagcattggaacttttttcagagttttaaagatggggcccgatgccggacagtgttggtcatacagcggttattgatgcttatgccaacgcgggacaaaataaaaaaactcacaaaaagtatatgcggatgttggcatctggg

SEQ ID NO: 758 - DNA, 264 bp, Gossypium hirsutum
  Clone ID: LIB3493-050-P1-M1-G1
cctgacgcgtggagacattatcaagggtgcagttgtcatatctattggatcgattctctcttcttatcagcccagccagattttaagaagaggatcctagacgctgtgaatgacaagcgagcatcctttgctgttaccacagcaaggcaagaagagatatttttggagatgggtgctgatccaagtttcggtcttgcatgcctggggaaagtaaatatgacccacgagaatgatcaaaatttgatgattcgctattatagattt

SEQ ID NO: 759 - DNA, 222 bp, Gossypium hirsutum
  Clone ID: LIB3493-050-P1-M1-G10
gcggccagaatccctgtaattagttgggtttcaaaaataagagatacgcgcttgcttgttgaagcgagggacgctgataaggtaatacagacatgatactagaggatatgggacgtccgtccaatgctgatttgtccgtggggggtgcgcgcttcatgtttacgccttctcgccacgtctgtattattgcaccaaaacactttgattggtttaccagacaac

SEQ ID NO: 760 - DNA, 355 bp, Gossypium hirsutum
  Clone ID: LIB3493-050-P1-M1-G11
ggaggtcacaatgtgatttgcggaattttcgattacttgcaggagcgtgctccatgtagcactttgtatggttttaagggtggtcctgctgggatcatgaagggaaaatacgtagaattgactgcagattatatttacccttacagaaatcagggtggctttgatatgatctgtagtgggagagacaagattgaaactcctgagcagttcaagcaagctgaagaaacaacagcaaaacttgatctggatgggcttgttggtattggtggggatgactcaaacacaaatgcttggcctcctggtgaaaacttcaagaggaaaaatctgaaaactcgagtgattggatgcccaaaaa

SEQ ID NO: 761 - DNA, 355 bp, Gossypium hirsutum
  Clone ID: LIB3493-050-P1-M1-G12
atccgttaagcgaacaggcgtcggaaatcgcatcgaatatcaattaccacgcgcagttcagtcctcatttctcgccgttcaagtttgagccagaacaagctttcttcgctacggctgagagtgttcgcgaccgtctcgtcaagcaatggaatgaaactttccttcactatcataaatgtgatccgaaacaaacttattacttatcaatggaatatcttcaaggacgagcctttacttatgcgattgggaatcttggcattcaaaatgcctacgccgggggtttgaattaagttaggcatggacccgaaaagattggtgggccagagaaagatgccggacttggaaatggggggtt

SEQ ID NO: 762 - DNA, 277 bp, Gossypium hirsutum
  Clone ID: LIB3493-050-P1-M1-G2
cggacgcgtgggcagacacgtggggtcgccattcaaccgttccccctgctactgccatcttcacatttctcctatgtccgccggtttccgcctctactcctcatctgtcggctgacgccaccgtacgtcactctctctcaacgaagaaaaaaaaaaacgggaggtccttcacggcagtgtcaagtttgcaaccaaactcaatccaaatacaaatgcccatcttgtattattacttactgatctctggcatgtttcaagacacacaaagaaactccct

SEQ ID NO: 763 - DNA, 285 bp, Gossypium hirsutum
  Clone ID: LIB3493-050-P1-M1-G3
ttccggtactgcatgttcgacccaagcctcccctacagttgaatcacaaattatcggggagattcatacagtcagattgctgtctctaaccttactgtggtctttgcggcttcttggatctgtatcttgtactgatgcagagacgtccaggggaggtctgattgaagctactcactacggcggctttgatgttgttactgctggaaaagctgctggtcgcattgcctttggactcttcacaaaggcggctcctaaagcagcataaaacttacgagcactatgcac

SEQ ID NO: 764 - DNA, 352 bp, Gossypium hirsutum
  Clone ID: LIB3493-050-P1-M1-G4
gtggcctcgttccaatcgtcaaacgtgaagttcttgttgacggatcacatgacattcaaaagtgtgctgcagtgacagatcgtgttcttgctacctgctactaggctctaaatgaccaccatgtcatgcttgttggtactcttttgaagcctatcatggtgacccctggttcggactccccgatagttgccccagatgttattgctgagtatactgtccgcgccttgcatcgaactgtccctgctgcagtcccagctattgtattcttgcctggtgggcaaagtgaggaggatgctaccctaaaccttaatgccatgaacaagctcctgaccatagaaccatggtcactctc

SEQ ID NO: 765 - DNA, 346 bp, Gossypium hirsutum
  Clone ID: LIB3493-050-P1-M1-G5
cgttgagcttaatggaaccaatggcgagactttcacccatggtcgggatggccttgcacagcgatgccagaagtactatgaagctggtgctcgctttgctaaatggcgtgctgtccttaagatcagtgctaatgagccaaccgagcttgcaatccaagaaaatgccaacgggcttgctatgtatgctgccatctgccagcaatgtggccttgtccccattgtcgaacctgaaattcttgttgacggatcacatggcattcaaaagtgtgctgcattgacagagcgtgttcttgctgcttgcttcaaagctctaaatgaccaccatgtcatgcctgagggtactctt

SEQ ID NO: 766 - DNA, 351 bp, Gossypium hirsutum
  Clone ID: LIB3493-050-P1-M1-G7
cattgaagaaaccagcaagtgtgctgatctcactcttcaggcagaaacagagcagcgaccacacaaggttagcttttacgttgataagactaaagcccaagtagtgatgaaagaactctctagccgtttggaaaagcgagggttggatgttaaactaatttatagtgggggaatggatttggatgtattaccacaaggtgctggcaaaggacaggccctctcatatttactaaataagttgaagactgagggaacactacctgttaatactcttgcttgcggtgattcccgaaatgacgctgtactcttcagcattccagatgtgtatggagtcatggtcagcaatgccca

SEQ ID NO: 767 - DNA, 349 bp, Gossypium hirsutum
  Clone ID: LIB3493-050-P1-M1-H1
gtcaattccagatagcattcctcctttgaaagtgattgtgtatgataaagatacattttcacatgacgattttatgggggaagcagagattgacattcaaccgctggttgctgcagcttaagcccatgatcgttcatagattcacgaatcaatgcagctagggatatgggttgcgagcaaagacaacacccttgtaaaatgacggtataattactgtgacagatgggaaagtaaaacaggatatctctcttcggctacataaggtagagagaggggtgctcgagattgagctcgaatgtgttccacttactcaatagctcgtaaaagggaggaaaaatagtcaggttca

SEQ ID NO: 768 - DNA, 326 bp, Gossypium hirsutum
  Clone ID: LIB3493-050-P1-M1-H10
gtgagcagttgtctggttgtgcattcactgttaatggatgggtgcaatcttacggatctcgatgtgtcaagccaccaatcatctacggtgatgtttgccgccccaagccaatgactgttttctggtcatctactgcacaaagcatgactgcacgcccaatgaatggaatgcttactgggcccgttaccatcctcaactggtcctttgtcaaaaatgatcaaccccggtttgagacttgcttccaaattggcttggccatcaaggacgaaatggaagatcctgagaaagccaagatcaatggtatccaaattgaccaagctgctttg

SEQ ID NO: 769 - DNA, 297 bp, Gossypium hirsutum
  unsure (1)..(297): unsure at all n locations; Clone ID: LIB3493-050-P1-M1-H11
nccacgcgtncgnttttcagcgtgagcgactgcaaaatgtactggcaaatcaacggtgaatatcttgctgtaaaagctgaccgatacacgaaaacaaaaaaaagtacttataccggttttgagctctttcgcatcaaggaaagggacataccaattgaggttttggagcttgataataaaaatgataagataatcgcttttgcttgggagcccaaagggcacaagtttgcttgtattcatggggataatccaaggcctgatattaagcttttctcgatgaaatcatcgcacaatttg

SEQ ID NO: 770 - DNA, 343 bp, Gossypium hirsutum
  Clone ID: LIB3493-050-P1-M1-H12
gtgcctgcttatttcaatgattcccaaaggcaagctacaaaagatgccggatccatttccgggcttaatattttaaggattatcaatgagccaacggctgctgcaattgcgtatggcttggacaagaaggcatcaaggtccggcgagaagaatgtattgattttcgatctgggtggtggaactttcgatgtttcattgttgacgatagaggaaggtatatttgaagttaaagccaccgctggtgatactcatcttggtggtgaagatttcgacaacaagcttggtaatcatttcggtcaagaattcaaaaggaaacataagaaagatatcagcaccaatgcaa

SEQ ID NO: 771 - DNA, 306 bp, Gossypium hirsutum
  Clone ID: LIB3493-050-P1-M1-H2
tacctccgtacatgcaacattatatattactgcgagggcgaataaacagaccgatatatgaactgaaaatgtgtccattacatctgcattgcagcatactgcattaggcgtgcctttgctgatcgcccctccggtaaattcatgcatgcccctacataactgggatcctggactaccggatgagactgtcacttacaactggctaatctgaatagtttctcttgcttttttgggccaactatatattgcaatctatctctgggcattgatcgaacttggggctcaagctcaaaggtatcgattcaa

SEQ ID NO: 772 - DNA, 95 bp, Gossypium hirsutum
  Clone ID: LIB3493-050-P1-M1-H3
acgcctacatttgagagctcctcatgcgctaaaaatgtgaaatcttcctaagctcgtggagtgcgctctgcaacctaagacagttccattgaatt

SEQ ID NO: 773 - DNA, 360 bp, Gossypium hirsutum
  Clone ID: LIB3493-050-P1-M1-H4
caattttgtaagcaagtatggctaaggacgttgatgttggtggtgagttccaagccaaggactaccatgatcctccaccagctccattggtggacggggaggagttgacaaagtggtcattttatagggctgtaatagccgagtttattgccacgctcttatttttatacatcactgtgttgacagtgatcggatacaagagtcaggttgaccctgataagggcagtgacgaatgtggtggtgttggcattcttggcattacttgggcttttggtgggatgatctttatacttgtttactagactgtgggatctcttgaggacacataaacccatcagggaccctttggctggacttggc

SEQ ID NO: 774 - DNA, 357 bp, Gossypium hirsutum
  Clone ID: LIB3493-050-P1-M1-H5
attatgttgctcctgaagtactagatagatcatatgggactgaggctgacatgtggagtatcggagtaattgcttatatacttctttgtggaagtcgaccattttgggcacgtacagaatctggcatctttcgagctgtccttaaagctgatccaagctttgatgaatccccttggccttctttatcccctgacgcgatagattttgtaaagagattggggaacaaggactaccgtaagagactaactgctgctcatgctctgagtcatccatggttggcaaattgtcatgacataaagataccatcagatatgataatatgcaggctcgttaaaagctatataggctcctctacac

SEQ ID NO: 775 - DNA, 325 bp, Gossypium hirsutum
  unsure (1)..(325): unsure at all n locations; Clone ID: LIB3493-050-P1-M1-H6
gccctttacctggtgaaagcaggggagatggtgtacggctaccaaccttttgcaacaaaagacccgaaaatattcgtgaatgcggatgaatttgtcccagacaggttcatgggtgacgatggtgggaggctgttaaatcacgtgctgtggtcgaatggacccgagactgaagatccatcgacggcgatcanacagtgtgccggcaaggatttcgtggtgctggtgtctcggcttttcgtaggggaactgttcagacgttacgattcgttcgagatcgaagttggttagtcgccattgggagctgcagttacagtaacctcattga

SEQ ID NO: 776 - DNA, 291 bp, Gossypium hirsutum
  Clone ID: LIB3493-050-P1-M1-H7
atcagtaagaaatctgtgtgccccagttgaagaatggactgttggagggactgcccttacatcaatgatggatgtggagaggaggcatggtaaattcaagcctgttattaagaaggcaatggtagaattggatggtgcaccattcaagaaatttgcttccttgcgggaggagtgggccattaaaaactgctacattagtcctggtcctattcaatttggtgggccagcttctaatgcagtttaccacactctgctccttgaacttggggctcaagcttataaggatcgatt

SEQ ID NO: 777 - DNA, 310 bp, Gossypium hirsutum
  Clone ID: LIB3493-050-P1-M1-H8
cctacatttgagagtacctgcagtgctagaaatgagaaatcttcttcggctagatgagtggcagctgcaattgtggacagttccattgaatttggggatttcttcaaaggcccattaccaggaatatttctcaatgcttttagcatttttggctttatctcgtcttggagtttatatacctctgggaggggttaaccgagaggctttcgttggcaatttggatcataacagtctactaagcactttggattcgttctccggaggaggcattggtagacttggtatatgctcccttggtattgttactttt

SEQ ID NO: 778 - DNA, 327 bp, Gossypium hirsutum
  unsure (1)..(327): unsure at all n locations; Clone ID: LIB3493-050-P1-M1-H9
ggggaaaggtagaaaatggtaaatcatgaagaggaagaagaagatattgtgtggttggacggatctttcttcatcaatgacaattaccagcttacttctttcacctttgggtctcatgttctccagctctattgtcttcactcagcttctactgattttgatttgacaggacaattggtatggcctggtgcaatgcttttgaatgattatctctctaaaaacgctgagatgcttcaaggatgttccatgattgaattangctctggtgtgggtatcactggcatgctctgcagcagattttgtcggcaaattcttctgactgatcat

SEQ ID NO: 779 - DNA, 385 bp, Gossypium hirsutum
  Clone ID: LIB3493-053-P1-M1-A1
ggaggcgcttttcaacactgagattaacaagaaccttaaccagtccgaatttgaggcactgctgcaagagttcaagactgattacaatcagactcactttgtaaggaacaaggagttcaaagaagctgctgataagattgatggtcctttgagacaaatcttcgttgagttcttggagaggtcttgtactgctgagttctctggttttctcctctacaaagaacttggaaggaggctcaagaaaaccaatccagttgtggctgagattttctctcttatgtcaagggatgaagccaggcatgccgggtttctgaacaagggtttatccgatttcaatttggcattagacctttgctttttgacaaaagcccagaagtacactttt

SEQ ID NO: 780 - DNA, 387 bp, Gossypium hirsutum
  Clone ID: LIB3493-053-P1-M1-A10
cggacgcgtgggcatggatcccaggcaagatttttattggcaaaattgaacccatcagcaacatacaacaatgccaatgaaatggctgccggttcagatgtaatctttacggatgatgtaagcttacaagtgttctttgaacatctccaaaggttggctgtacaatcttaatatagaaaaaatagtcgaaaggaagactcaggtatttccggtatggtatgaaaaattcattcaatacgagttatgtatcctgtcttacattctctcttccatttagttcttttttaccttttctttccatcaattttatgaatgagacgacgagcccccatgacgatatttgaaaaaaataagttttaaggatggccaataagggatgcagcagat

SEQ ID NO: 781 - DNA, 396 bp, Gossypium hirsutum
  Clone ID: LIB3493-053-P1-M1-A11
tcttaccccgacccttaaacatcgaggccagtcattattttaaatttaagaacccacccccccgccaacatacacccatgacccagaattggcttgccttccagataaacaattgcacgcatcatgtaaagttacaagtcctcttagaacatctacaaccgttggctctacaatctccatatacaaaaaatagtcgtaaggaagactcatgtatttcctgcatattctgaaaaattcattcaatactatttatgtatcctgtcttacattctctctaccatttaaaacttttttactctttactttccatcaattttatgaatcaaaccacgatcccccatgaccatattttaaaaaaataaattttaaagatgaccaataatgtatccatcatat

SEQ ID NO: 782 - DNA, 153 bp, Gossypium hirsutum
  Clone ID: LIB3493-053-P1-M1-A12
cttttgcacccgctctgtttctatctcggctctgacgagaagccggcgccgacatggttcacgtcagcttctaccgcaattatgggaagacctttaagaagcctaggcgtccatattaaaaggaacgattggatgccgagttgagacttgtag

SEQ ID NO: 783 - DNA, 178 bp, Gossypium hirsutum
  unsure (1)..(178): unsure at all n locations; Clone ID: LIB3493-053-P1-M1-A2
gttggccaaatcatgaccactctcgggagcggtgagtggatgatactactatncacaccccacgtgggatcctgcgctagatatatcaccggacaagttattctgctaccttcggaagcttcaaggttcttccaatggaggagcgattataaagaacgtggtggctcaagataggcgg

SEQ ID NO: 784 - DNA, 359 bp, Gossypium hirsutum
  unsure (1)..(359): unsure at all n locations; Clone ID: LIB3493-053-P1-M1-A3
gacattgaagaagagatgaaaagggtggagggaattcaacacaaaacagtgagcgtcaatggcatcaacatgcacatagccgagaaaggggaaggtcctttgattctcttcatccatggcttccctgagctctggtatacatggcgccaccagatcaacggtttagctgccctcggctaccgtgctttggcgcccgacctccgtggttacggtggaaccgatgcgccggattgcgtcgccgattacacttgcttccacgcggtgggagacctcatcgcgcttctggacatggaggcgccgccggagaaggaggataaggtgttcgtcgtaggacacgattggngtgccatcattgcttg

SEQ ID NO: 785 - DNA, 391 bp, Gossypium hirsutum
  Clone ID: LIB3493-053-P1-M1-A4
gttctccagataagttgactctcctcttgccaatccttcagttgaaataatatgagcaaccatatttgcttctctatttgtaaaaaggaatacacagttctgaaatcctaggctaatactcttagaatcgttatatgagtgtagcaatctcagatctatcctcattttctttttaaagctttcgaatcaccgttcgagaatcacccttgatctccacctccctcagatccagttgtaaacccagctgtagcgcttgaaagcacggcaccgcttcagcagcgaaaacagacacatcgaagtaaatcttgaacctcgatccctccggagcaacccaactagtcacacagagacgcttgacaggacactcgcggaacacatgttctctagtttc

SEQ ID NO: 786 - DNA, 394 bp, Gossypium hirsutum
  unsure (1)..(394): unsure at all n locations; Clone ID: LIB3493-053-P1-M1-A5
cttacccgcaacttcaagcacgtgaaccttgatttccatctcatcaaggacgaagagaccggcaagcgtaagctcaggatcgaggcttggtttggctccaggaagaccagcgccgccatccgtacagctcttagccacgttgagaacctcatcaccggtgtcactaaaggataccgttacaagatgaggttcgtctacgctcactttccgattaatgcctccatcactaatggcaacaagtcgatcgagatccgtaacttccttggcgagaagaaggtccgtaaggtggatatgnttggaagtgtttccattgttcgatccgagaaggttaaggatgagattgttttggatggtaatgacatcgaacttgtatcccgatctgcagctttgataa

SEQ ID NO: 787 - DNA, 394 bp, Gossypium hirsutum
  Clone ID: LIB3493-053-P1-M1-A6
cgtgagtacaaggctaaaaagatcactgaatatgattatgtcaatgccatgaaggaggaaattagcaaagttgtcaagctccaggaagagcttggcattgatgttttggtgcatggtgaaccagagagaaatgacatggtcgagtactttggtgagcaattatccggttttgccttcactgtgaatggctgggttcagtcatatggatcccgttgtgtcaagcctcctattatttatggtgatgtgagccgccccagagccatgactgtcttttggtcttcaacagcccagagtatgactagacgacctatgaaaggaatgcttactggcccagttacgattctgaactggtcctttgtgagaaacgaccagaataggcatgaaacatgctacc

SEQ ID NO: 788 - DNA, 275 bp, Gossypium hirsutum
  Clone ID: LIB3493-053-P1-M1-A7
cattaacataacctatatgtgtctttccaacccctttcttccatctccatctcctttctgcaattattcccaactttccatggcttccttcacgcccaatctcgaacctgcccctgacacctctcttcagttcaagcccaagaaacccaggataacccttcaaaccccttcctcttgtccttccaatcaacgcacccaaagaattaagcgatggcggacccaacgagaccaacacatctactcctccaagctcttccaggctctccgtcgttctc

SEQ ID NO: 789 - DNA, 342 bp, Gossypium hirsutum
  Clone ID: LIB3493-053-P1-M1-A8
cagactcaagatgacgggagagactattctgaaccaccaccgtctccatttttcgagcctggcgagttaacctcatggtccttttatagggctgggattgccgagtttgtggcgactttccttttcttgtatatcactattttgactgttatgggagttgttaaggaaaaaactaagtgcccaactgttgggattcaagggattgcttgggcttttggtggtatgatctttgctcttgtttactgcactgctggcatttcaggtggccatatcaacccggcagtgacttttggactgttcttggcgaggaagctgtcgttgacgagggcaattttctacatg

SEQ ID NO: 790 - DNA, 287 bp, Gossypium hirsutum
  Clone ID: LIB3493-053-P1-M1-A9
acaaatcaatgtggagtacaatggttcatatgtctaccatgctatgtttgcctattttgatagggacaacgttgctctcaagggtcttgccaagttcttcaagggatcaagcttagaagagagagagcatgcttagaaattgatgggatacccgaacaaaagaggtggacaagtgaagctgccatccataataatgcccctctcttagtttgatcattccgagaaagggggtgctttatattccatggagcttggcttggcttttgaggaacttaccaaccaaaagg

SEQ ID NO: 791 - DNA, 402 bp, Gossypium hirsutum
  Clone ID: LIB3493-053-P1-M1-B1
ctacctacaactctatcatgaagtgcgatgtggatatcaggaaggatctctacggtaacattgtgctcagtgggggttcaaccatgttccctggtattgcggaccgcatgagcaaggagatcactgctcttgctccaagcagcatgaagattaaggtcgttgcgccaccagagagaaagtacagtgtctggattggaggatctatcttggcatcactcagcaccttccaacagatgtggatttccaagggtgagtatgatgaatccggtccatccattgtccacaggaagtgcttctaagttttgtaattgcttttgatggtggtctacattttgcatttagttggctttttttggtgtgccgtgtcaagtgaactcaaaagtctggtttatgtcggggaag

SEQ ID NO: 792 - DNA, 389 bp, Gossypium hirsutum
  Clone ID: LIB3493-053-P1-M1-B10
gagccattgaagacaacttttcgaatctggaaccctcttgatttctatccgaaatttgtgtcttttgtccgcgaaatccctcctgtttgcgctaagatttgcactaaccaccatccacaggccaaaggattcccccatcatcggcaaagcatcattctttgtcgctgaatctgttccactattcgaagggcttctggaagtttctacacgaccgtgaccgctccgatctgccaaagaagagagacataaatttttaagatgtccatatttatggaaagagaaacatacctcgagtaaggcctctaattccacacgttgaagatgaccattgacgagcacttgagaggattttttttgatagaggaatcctggcagccccgaaaaatgga

SEQ ID NO: 793 - DNA, 373 bp, Gossypium hirsutum
  Clone ID: LIB3493-053-P1-M1-B11
gtgcagatgcgtgcaacgggtgggggttgcctcggtgttgcagtctatactgccttggtttccgtccctgcatacatcaatgatgctcaggcttaaacgacaaatgaggatggtgaaaaagccggaccaaccgtcaagcacctgcttattatatctactggtcttatgactgggggcagtgcaattgtgacttgggttggtgtgccctcgaccttcaccatttacaattttcgcgatcagaaagctgttatgaactggctactactcttgtgcgtagggggaggtctctgggctgggcttactattggctttggtactgagtgcctacaccacgaatgcttgataggattccttttgctgcaggaattctggc

SEQ ID NO: 794 - DNA, 388 bp, Gossypium hirsutum
  Clone ID: LIB3493-053-P1-M1-B12
caaagaagaaaaaacttaatcatggctcggttgacgttggtgtcctccatcatccttctgctatgctccgtcgccgccggatcaactttcgaggactccaaccccatccagatggtatccgatggcctcagcggcttcgaatcctccggtcttcgtgtcatcggtcacactcgtcatgctctctccttcgcccgttttgcatacaagcatgggaagaggtatgaaaacgtggaggagatgaagctactgtttcagattttcaaaagcaacttggatttaatcagatccactaacaagaagggactgccttacactcttgctgtcaatcagtttgctgattggagctgggaagagttccagaaacacagattgggggctgctcaaaact

SEQ ID NO: 795 - DNA, 85 bp, Gossypium hirsutum
  Clone ID: LIB3493-053-P1-M1-B2
ctgtgatttctgaaattaacatggggagtgagcgttttatttgagtgcatccatgcctatagaaagaaacgctggacacaactac

SEQ ID NO: 796 - DNA, 399 bp, Gossypium hirsutum
  Clone ID: LIB3493-053-P1-M1-B3
gcttcttctcatactgtcattctgctcagtggctaaccttgcgtctaagcttcagccatggtggctgttgcttgtaattcccttcttgtttgtctccaacacttatcattgtgtcaatgcagaaccacaagtgccttgctacttcatcttcggagactcattgtcggataatggaaacaataacaaccttgcgacggaggccaaagtaaattattggccttacgggatcgatttccctaaaggacccactggaagggttactaatggtcgaaccatgcaggatatcattgttcaactactgggtttccaagaatttattcctccttttgccacttcaagaggccaagagattctcaaaggtgttaattatgcatctggttctgctggaattctcaatga

SEQ ID NO: 797 - DNA, 394 bp, Gossypium hirsutum
  Clone ID: LIB3493-053-P1-M1-B4
caaaaccatctcaagattcatgtcctttgaaagatgcagtctttgccattgttaaggttgctttggagaccatagactttgagttgcattctggaactcatcctcgacttggagttgtcgatcatatatgttttcaccccttggcacatgcttccttggaccaaacagctgtggttgcaaagtctttggctgcagatataggctccaaacttaaaggtctcttccttttgaaccaaatgttatgtagatattgccagttttagttagattagtgagtgcaactttggaagttcaaccaaaaaaccagttggtcagctatgtttatggaatagtgaattcttttaatatcctgtagcctggaagattttgcttttttttttttttcgtaatcaac

SEQ ID NO: 798 - DNA, 398 bp, Gossypium hirsutum
  Clone ID: LIB3493-053-P1-M1-B5
gccattgctctttcctgcaccgaggctaagccgatcattcatcagttccatcagcacactctactcgtttgatctcaaaattttctctggaaaatccgaaagaaaaagaaaaacaaacaaacacactgataaaaaaatgaaaataagacgacaatcccaaggcccattaagcaaaggcgaccaaattgaagtgaaacgaccaaacggagcgtattacgcagccaccgtgctccgacccccttcggcaatgcggaaaaacatggtgttcgtcgagtaccacgccgaagacggttccaaatgtgtcagggggtacgtcgacttaacccacgtgcgaccgtcgcctccgctggagctcaaccgtcgcttcagaatcggagacgacgtcgaagcctattggg

SEQ ID NO: 799 - DNA, 392 bp, Gossypium hirsutum
  Clone ID: LIB3493-053-P1-M1-B6
cggacgcgtgggcgagttcactgccatgttgtatcctctgctcattagttctgttggtattcttgtctgtttgatcacaaccctatttgctacggatttcttcgaaattaaggctgtcaaagaaatcgaaccagctttgaagaagcagcttattatatctactgttcttatgactgtggggattgcaattgttacttgggttggtgtgccatcgtccttcaccatttacaattttggggatcagaaagttgttaagaactggcaactatttttgtgcgttggtgttggtctctgggctggacttattattggttttgttactgagtactacaccagtaatgcttacagtcccgtgcaggatgttgccgattcctgcaggacaggagcagcta

SEQ ID NO: 800 - DNA, 342 bp, Gossypium hirsutum
  Clone ID: LIB3493-053-P1-M1-B7
cggacgcttgggccagggcactggcatgttatatcctctgctcattacttctcttggtattcttgtctgtttgatcacaaccctatttgctacggatttcttcgaaattaaggctgccaaataaatctaaccatctttgaagaagcatcttattatatctactgttcttatgactgtggggattgcaattgttacttgcgttggtgtgccattatccttcaccatttacaatttttctgatcataaagttgttaacaactggcttctatttttgtaccctgaagtctttctcattatcttcacttattattgcttttgttacttattactactacctttaat

SEQ ID NO: 801 - DNA, 351 bp, Gossypium hirsutum
  unsure (1)..(351): unsure at all n locations; Clone ID: LIB3493-053-P1-M1-B8
tgcgaattgctcaaggtttagttgatttggggaagggtctattgactcttaatccatatcattctgaccgctttttgctatcaccgactgcacttgctggtttggttacaatgttgcacgcatgcctcgatatgaaagctatggtactgggaaaataccattatgtcctctacttcattgttctggcaatgcagccaaggatgttgatgaccgtcgacgaaaacctcaaacctctatcagtcccagtccgtgtaggtcaagctgntgatgttgttgggcaggctggtcgacccaagactatcactggctttcaaactcattccactccggttcttcttgctgccggtgata

SEQ ID NO: 802 - DNA, 381 bp, Gossypium hirsutum
  Clone ID: LIB3493-053-P1-M1-B9
cttcgccacccagctgctgcaaagctctctcgaaacagtacctccggttccaacttcagctcaaaaatatgtcaggggaagaagttgcggttgcccaacccgaggcggcgcctgcactcggtgagccaatggacatcaacacagccttgccccttgtggttaggaagtcacgagctcacggtgggctcgcacggggattacatgaagctgctaaggcaattgaaaagcacaatgcacatctttgcgttatagctgatgactgtgaccagccggattatgttaagctggtcaaggcactttgtgctgatcataatgttaaagtgctacgtgccccgagcgcaaaatcacttggcgagtgggctggttgtgtaagatagactc

SEQ ID NO: 803 - DNA, 326 bp, Gossypium hirsutum
  Clone ID: LIB3493-053-P1-M1-C1
ctcatgccgaagtattccttgggtgcttgatgaaaaactggcgcagaaacatggtatttcaacggatcttccagaggagttgcgtagcaaattcttccttcaaggtggacagctggttaacagaacgaagaaaaggaaaaatgagaatagaaacaatgttggggaagcaaacggagaatctgggaaatccaaaaggaataaaggagaaactgggaagcctgatgctagtaaggaagaaaataatcagcctgaggacgaacctgtcaaatatccaattgatgacctgctggtgaagcctggtcctgatgatccactgtttactgatc

SEQ ID NO: 804 - DNA, 117 bp, Gossypium hirsutum
  Clone ID: LIB3493-053-P1-M1-C10
cgatcctcaacggtgtgtgtgtgaggaaaaaaactaccaagattggggccaaacaagatgggttccctgcatgaaccattggtagtggagaaccggttgaaaggatctaaccagggg

SEQ ID NO: 805 - DNA, 388 bp, Gossypium hirsutum
  Clone ID: LIB3493-053-P1-M1-C11
gcttggcaagcagtgggattcaggcaatcccgaaagaatatatcaggcctcaagaagagcttacaagcataggtaacgtgtttgaagaagagaaaaaagaggaagggcctcaggttccgaccatcgatttgacagatatcgagtcggaggacaaagaggtccaggagagatgtcggcaggagctgaaaaaagctgccatggaatggggtgtgatgcaccttgttaaccatggcatctccgaggagctcatggatcgtgttaggaaagttgggcagaaattctttgaactccctgtggaggagaaagagaagtatgccaacgaccagagctctgggaatgttcagggctatggtagcaagcttgctaataatgctagtgggcagcttga

SEQ ID NO: 806 - DNA, 311 bp, Gossypium hirsutum
  Clone ID: LIB3493-053-P1-M1-C12
ggagagggtatctggcttggaagcgaatgctctcactgtggatggagtgcccgttgattcttatctaaccaggtttgtttgggatgaagcaaagtacccaactatgtcccctttgagggaaattgttgatggtattcacactcaagtggcaaagattgaggatgatctcaagggtcgtgttgctgagtataacaatgtgcgcgggcagcttaatgccatcaaccgaaagcaaagtggaagcttggctgttcgtgatctatctaatctagtgaagccagaggatatcattacttcggaacacctggtgactc

SEQ ID NO: 807 - DNA, 395 bp, Gossypium hirsutum
  Clone ID: LIB3493-053-P1-M1-C2
ctttcctcacaaaaatcccctttgttaatccaaacaaaacgcccttttgctttctttttttttttttttttgctctttttgacctttttagcttgttagattcccaagaatccaactttctgtccaagttttaaaaaaaagatggatgtaaagaaaagcaaagcaacagtggcactgatgatgatgttcatgatgttgtttcttgtaaattttccagggtgtttctcggctgccagtcagcaacccatcaataaaaagtcaacccatcttaagcctcataatgggtttcattcatcttttctttttcctgtcactgggaatgtttatcctcttgggtactattctatatcactgtccataggcaatccacccaaggttttcgagttcgatattga

SEQ ID NO: 808 - DNA, 380 bp, Gossypium hirsutum
  Clone ID: LIB3493-053-P1-M1-C3
gctaatttctcgaaagaaacaatggcgggagagttcattaggacaacgtacgagcagccagcactgactacggttcaggggacggtgctagaggtcccggttatcgatctaagcgaccccgatgaagagaaggttgtccgagccattgtggatgcgagcagtaattggggaatgttccaagttgtgaatcatggcattccccgtgaaaccgtatggaagctgaaagaggtcggaaaggctttcttcgagctcccaccacatgaaaaggaagcttacgccaagtccccaggatctcaatccattgaaggctatggaacgaagcttcaaagagaagttgaagggaagaaagcttgggttgatcatctcttccataagatctg

SEQ ID NO: 809 - DNA, 398 bp, Gossypium hirsutum
  unsure (1)..(398): unsure at all n locations; Clone ID: LIB3493-053-P1-M1-C4
acgcccacgcgttcggaaaaaaagagggatggggtctgtaataaaatctgcaatcttaattctgtcggtgtttttatctgtacgcttcagttcgggtgttaggttgctccaggaacagcccaatgatgaccccaaaaacatggacgctattcctcccattgatgcactcaaccctaccgagttgaatggacccggtgttggcattcacgaagatcatgttgtcccaaaaggtgctgaaattggtactcttggttttggttttgaaggtgggcctgataaatgtggttcttctggatgttccggtaattggaatcctggtggtttcgttctaccatttccttaaattccagaaatcccaagaattccagaaatcccacaaatnccacagatcccacaaa

SEQ ID NO: 810 - DNA, 397 bp, Gossypium hirsutum
  Clone ID: LIB3493-053-P1-M1-C5
tgatatagcaaacgagatgatgctcaagtcatcgaacaggaagctgaaggaggacgaaagcggcattgcctggccagagtggttgtccgctggcgacaggcgcctgcttcagtcgtcttcggtgacccctaacgtggttgtggcggccgatggtagcgggaacttcaaaacggtgtcggaagcggtggccaaagcaccggagaaaagcagcaaaaggtatattataagaatcaaagcaggcgtctacagagaaaacgtggaagtcccaaagaagaagagcaacataatgttcatcggagacgggagaactaaaacaatcatcaccggcagcaggaatgtggtcgacggaagcaccactttccactctgccacagttgctgtggttggtgaaaagttc

SEQ ID NO: 811 - DNA, 394 bp, Gossypium hirsutum
  Clone ID: LIB3493-053-P1-M1-C6
tttcttcgtaagcagggaaatggtgctgtggcatctggttcacatacagatcgtgatggaaatataaactcaaaagttgtagtatcagagacgaataaacctagtgaagctgctacaatgccaaaggagactttgagcataaaccaattggcagctaaggctttgcagcttcggttgaaaggaaagcatgatgaggctgagaaacttctgctggaagttgagagcatgaaggctaagcagaacactggagatcatgccagtaagcagcagaatgttgacaacaacagcagacatgttgttcatgatgtattgcttcggaaagggaaggatgatgatgataccgataagcatctagctcgaagaataatgcagaataaacaatttagtgtatctg

SEQ ID NO: 812 - DNA, 395 bp, Gossypium hirsutum
  Clone ID: LIB3493-053-P1-M1-C7
cacaatttgaagtacatgggtaggtcgtctatgcttttgagcctcaagctactaaggcggatagaagtaaaagaatgcaatacaatggaacaagtgattagggaagacgaggaggaagcaacagcacatgagttcacatttcctgagctctactctgtagaaataaaggcgtgtttcaacttgacaaatttttatttgggaagtcgagctcttgaatttccaaagttaagtcatattgcgatagttgggtgtccaaaaatgacggcattttcttcttcaatttcaagagagagtgaaaaagtgattggcgagcaaggcgtgggagataacactacaactttattctgccacaaggttgtcattcccaatttggagtatctgactttgtcctccat

SEQ ID NO: 813 - DNA, 390 bp, Gossypium hirsutum
  Clone ID: LIB3493-053-P1-M1-C8
cggacgcgtgggttacaatacaggaagtgcaaaaagagagagaagcaaaacacattgagtctgagttccattacttagcagtatctctaaactctctcatcttcttatcttttagcacaactcaacaatcaagaagatcagagatcaaggagttagaaacctatcaaaatccacccatcagtcattctatcaatcaatcaatcaattcaaaagctcataaaaatttcccccaaaaaagaaaggatgtcgtcctcatcagtttcattttcatcggaccacctctctcccgcggaccagctctgttacgtccattgcaacttttgcgacactgttctagctgtgagtgttccttgcagtagcttgttcaacaacacagttatggttcgatgc

SEQ ID NO: 814 - DNA, 393 bp, Gossypium hirsutum
  Clone ID: LIB3493-053-P1-M1-C9
caccactttgatgcctgtgttcatggatatccaaatgccagaaatggatggatttgaagctacgaggagaattcgggatgtggaacagaatatcaataatcatattaaatttggagaaatttcagtggatgattacaacaatgtttcaaactggcatgtacccattttggctatgacagcagatgttattcaagctacacacgaggaatgcctacggtgtggaatggatggatatgtgtcaaaaccattcgaagctgagcagttatactcggaagtttcacgatttttccattaggcattattagatcagaaactgttggaagaacatctgctcatgacttggcatgggcactaatgggactgcctgtactttggcattctttgcgatacctc

SEQ ID NO: 815 - DNA, 363 bp, Gossypium hirsutum
  Clone ID: LIB3493-053-P1-M1-D1
gaaaacctttgttaaaccaaaagtggctgggaccaactcctccattcttcccaccaactccatccttcaatctcagccatcaacgccgttctctaaggctaagccattgtctgtccttcggatctccgccgtccattcttctgactcgcctaagaaccccgtcgtctccgacaaatccgtcaagcagcccgctactgctccactcgctgctaccaaatctgctaccgcgcccaccactgctccaccgaagaatgcggttcctgggaaatggaccgtggatagctggaagtcgaagaaggctttgcagttgccggagtatccggatcaggcggagctcgagtcggttctcaagactctcgatgc

SEQ ID NO: 816 - DNA, 386 bp, Gossypium hirsutum
  Clone ID: LIB3493-053-P1-M1-D10
attcaaatatattaactcacttggagtggaggattttaaagatctgaaatctggatacaccatcacatttaacttcaattccaatccatactttgaaaatacaacacttacgaagacctttaccttcctcgatgatggaaccaaaattacagctaccccaatcaagtggaaagagggcaagggcttgccaaatggagttaatcatgagaagaaaggaaacaagcggcaacttgctgaagaaagcttctttacctggtttgctgatgctcagcaaaaagatgacatggatgaaattcatgatgaggtagcagagattatcaaggaggatttatggcccaatcctctcacttatttcaacaatgaggctgatgaagaggattttgacg

SEQ ID NO: 817 - DNA, 391 bp, Gossypium hirsutum
  Clone ID: LIB3493-053-P1-M1-D11
gggatgtaagtggtgcgaacccggccataaagaagtgcagacgtgggaatgggattaagttcacagccaactttcggagatcagaggtcaactgtccggggaaccttaggcagcatgttacaccgctcattgctgcagaaattaagtggttcagatctccaactgcaaattacaaatgtagcgttagggtcagaattttaaattgttttaacactatatagcaaactttccatcaaaatgaaaagattatatcactcacagcttggagtggtgagctttagggtcctgaagcaaatatcataaagtgcctcattgtcaaggaccatgcattcatcagcagtctctaccaactggtgcacagagagggtggcattataaggctccacgactg

SEQ ID NO: 818 - DNA, 375 bp, Gossypium hirsutum
  Clone ID: LIB3493-053-P1-M1-D12
gtaaaaatggagttcactgaagcgtataaacaaacgggtccttgctgtttttcaccgaatgctcgttacattgcgggtgctgtcgattaccgtcttatgattcgggatacactctccttcaagggtgtgcagttgttttcttgcttggacaagataagctatattgaatgggcacttgattctgagtacattctttgtgggctctataagagacccatgatacaggcatggtcactcacccaacccgaatggacatgcaaaatagatgaagggcctgctggtattgcttatgcaagatggagcccagatagccgtcacatactgaccaccctgaagtttcagctgcgattaacaagttggtccttagtgaacaca

SEQ ID NO: 819 - DNA, 363 bp, Gossypium hirsutum
  Clone ID: LIB3493-053-P1-M1-D2
gaaaaccttggtaaaccaaaggggcggtagcaactcctgcaggcttcccaccaactccatccttcaatctcagccatcaacgccggtctctaaggctaagccattgtctgtccttgggatctccgacgaccattcttctgactcgcctaagaaccccgccgtctccgacaaatccgtcaagcagcccgttactgctccactcgctgctaccaaatctgctaccgtgcccaccactgctccaccgaagaatgcggttcctgggaaatggaccgtggatagctggaagtcgaagaaggctttgcagttgccggagtatccggatcatgcggggctcgagtcggttctcaagactcttgatgcttt

SEQ ID NO: 820 - DNA, 394 bp, Gossypium hirsutum
  unsure (1)..(394): unsure at all n locations; Clone ID: LIB3493-053-P1-M1-D3
gctcgacaaggttgttggcagatgacgtgctgtggacgagtctgatgtanccaaaatgatttatcttccggctgtgatcaaggaggttctgaggcttcatccaccgggccccctgctttcctgggcccgtctagctatcactgatgccactattgatgggtatcacgtgcccaaggggactacagcaatggtgaacatgtgggctattacgagggaccctcaagagtggccaaatccacttgaatttatgcccgatagatttgtgactggagaaggtgaggtggagttttctgtgcttggttcagaccttaggctggctccattcgggtcgggcaggcgaacatgcccgggaaagaacctgggttgaccaccgtcagcttttgggtggcaaccc

SEQ ID NO: 821 - DNA, 300 bp, Gossypium hirsutum
  Clone ID: LIB3493-053-P1-M1-D4
aagctctctctccccatcgtccggctccgagagaagacagagaggtctcctcacaaccaccgtaatgggtcgtgtcattcgagctcaacgtaagggtgccggttcggtcttcaaggcccatacccaccaccggaagggtcccgcccgtttccgcagcctcgacttcggtgaacggaacggttacctcaaaggtgtcgtcaccgacgtcattcacgaccctggccgcggcgctccgttagcccgcgtaagtttccgtcaccctttccgttacaagaaacagaaggaatttgttcgtcgccg

SEQ ID NO: 822 - DNA, 379 bp, Gossypium hirsutum
  Clone ID: LIB3493-053-P1-M1-D5
attttctttccatcaatcaaaatggatggttcaatttcaaacctttcttcttcttcttcttcttcttcttcttcttctttatggttcaactacacatgcactattttctccttcatcttcttcactttcacgttctcattttccctcttttcattatcaatcttcattttaagattaaaactatggtgtaaatgttcaacttgccaatcattcctcacttcaagttggtccaaagatttcaataacctgtgtgattggtatactcaccttctttcaaaatcgccgacgggaacaatccatattcatatcctcggcgatatcatcaccgccgatcctaaaaacgtcgaacacatattaaaaacaaaggtcgaaaattacc

SEQ ID NO: 823 - DNA, 391 bp, Gossypium hirsutum
  Clone ID: LIB3493-053-P1-M1-D6
cggacgcgtgggtttttcccgagggacggtttctcgagaaaaaaaccaatgcaaacagcggaggacatccgtaatctcccaatcgacatcacattttctcgtcttggagaatggttagtagatcgcaagagaataccgtctgattggagaaagagattggcggcgatacgatccaagatatcgaaggagttctcggcgttgcctaaggatattgatccctattttcaagcccttgaccctgaatggattggttacttagaggccaagaaaatatatgatattcttcttaagttgactccagaaagccggaacatatttggtccgctatcaggtgcttctggatcttgggaagcaattgtgcgttcttttgagaaagatcatctataccttg

SEQ ID NO: 824 - DNA, 392 bp, Gossypium hirsutum
  Clone ID: LIB3493-053-P1-M1-D7
aagcgatacatgtaccttacaggagagattttgaaagagaatcccaatgtatgtgaatacatggctccttcactggacgctaggcaagatatggtggtagttgaggtgccaaagctaggcaaagaagcagccaccaaggccattaaggagtggggccagcccaagtccaagatcacccaccttgtcttttgcaccactagcggtgtggacatgcctggggctgactaccagctcaccaagcttttaggcctccgcccctccgttaagcgcctcatgatgtaccaacaaggttgcttcgcaggggggacggtgctccgagtggctaaggacttagctgagaacaacaaaggtgctcgtgtacttgttgtgtgctcggagattactgctgttac

SEQ ID NO: 825 - DNA, 392 bp, Gossypium hirsutum
  Clone ID: LIB3493-053-P1-M1-D8
ccaacttctagtcctgctgttacgctttccaccagtgcaacatcaaaagaatcctgccctaggtgctctcagggtttcttttgctctgatcatggttcacagcccaaagtaccgaaccctaccccagctgtactggctaagagcagtgcggatgttaaggagtcttctcctccaccaaagaagatagttgacataaaccagcctcagacttgcaaaaataaaggatgtggtaaagttttcaaagaaatagagaaccatgagtctgcatgtagttaccatcccggacctgctgttttccacgatcgagtgagagggttgaagtgctgtgacatttatgtgaaggaatttgatgagttcatgaccattccaccatgcaagaagggatggcacga

SEQ ID NO: 826 - DNA, 389 bp, Gossypium hirsutum
  Clone ID: LIB3493-053-P1-M1-D9
cggacgcgtgggggacccgagagggttcttgatactccgattactgaggctggttttaccggaattgcggttggtgctgcttactatggtgtaaagcctgttgtggagttcatgacatttaacttctccatgcaggcaatcgaccacattattaactctgccgcaaagacaaattacatgtcttctggccggatatccgtacccattgtttttagaggtcctaatggtgctgcagccggtgtcggtgcccaacactctcagtgttatgccgcatggtacgcttcttgtcctgggttgaaagtgctggcaccgtacagttctgaagatgctcgtggacttctcaaagctggtattagagatcctgaccccgttgttttccttgagaatga

SEQ ID NO: 827 - DNA, 396 bp, Gossypium hirsutum
  Clone ID: LIB3493-053-P1-M1-E1
caatgtcaaacctcaactcttaaaattaagtttgtttttctttttaccgtcaccaccattaaaatccttcttcttcgtcttgttcttcctcttctcctccttattcgcttcttctttgtctttgcccaacgccctttcatttgttctctcttccttcaaactctgtttttacttttaatgtacaaattatgaaattagtattaccactatctgcaaacactaattcagtttagtttcttacaacaccaaggccaatgtttcaaatgatcaaacatcacccatatttccaccatattaaaagctcggtctttggctttatgtttttgttacccacttcactttttgctctttcccttcttcttttagctcgcaatggcttctctgttttttatatgt

SEQ ID NO: 828 - DNA, 388 bp, Gossypium hirsutum
  Clone ID: LIB3493-053-P1-M1-E10
tccatcaacaccatcacagactcgttctcatggtactccaccatcatctggaggtggtagtcccccatcgtatggaggaggcagtcccccatcgtatggaggaggcagtcccccatcatacggaggtggcagtcccccatcatatggaggtggcagtccaccaactactcccattgatccaggaactccaagcattccctcacctccattctttcctgctccaactccaccaattggtggtacatgcgatttctggaggagtcaccccacactgatatggggtctgcttggttggtggggcactgtatgcaacgcatttggcgtgaccaacgctcctggacttggaacaagcatgagcttgccccaagcacttttaaacacacgtact

SEQ ID NO: 829 - DNA, 386 bp, Gossypium hirsutum
  Clone ID: LIB3493-053-P1-M1-E11
cccacgcgtccggttccgctcatgctaaaggaagatttaagttcaatccaaattgcagaaacataacaaaaacatgataattagaaatgattacccaaaagtaaacacatgatacccaacaatcttttcttacaccttctcttccctctcacggttccattgttcaatcctggctctccgctcctcacttccttccctagcaggtggagggcttctgcttcgcctaggactcccatgctttctcctactcccgctttcacggtcatacctatccctatccctatccggtcttcgcccatttctatcacgatgatcatttcggtcttgatcttgagactctttcctatattccctctcacgccggtggcgaggactggcgctcctac

SEQ ID NO: 830 - DNA, 390 bp, Gossypium hirsutum
  Clone ID: LIB3493-053-P1-M1-E12
cggacgcgtgggatcctgaggaaaaaaatgctcttatcaagacatcttttgatgtgggtcctaaattgcagttcaaagctgctcatgatgttaaggcaaaacgaggcgaggttgcaatgattgcgaatgttgctgatcctggttatgccgttgaagtgtcgtctcctgttccatatattggcttgccgaaagcaacaattagattccctaccggtgaagttacacttgaggagagagaagatgaagaagtgccaagcaaaattgttgataaatgggattcttaaaggtccgattttgaatggggtcggtgcagcccattacacagatgaagaactgagactaagatactcatataaggatgaatcactgtcatttattccaagcatttca

SEQ ID NO: 831 - DNA, 375 bp, Gossypium hirsutum
  unsure (1)..(375): unsure at all n locations; Clone ID: LIB3493-053-P1-M1-E2
tgaatatggaggtccaggcagaagttatggagagtgctatggccggttccacttcattgtccacaccagaaggtgaggtcaacagcttgatgcagcaagttgctgatgactatggcttggaggtctctgttgggttgccacaacctggtgctcatgctgtgtcgaccaagacagaggagaaggttgacgaggatgatttgtcgaggcggcttgcagagcttaaggctagaggttagagaaatgatggaattgatttggatgatcttgtgatatataatagtactatgatgtttgggattgtaagtgctggttgaaacatctcattccatatgtaaatntgtctgaattgggtttacctttataattttaaatgct

SEQ ID NO: 832 - DNA, 146 bp, Gossypium hirsutum
  Clone ID: LIB3493-053-P1-M1-E3
cttggattttggagcccccaaaagcatagacaatattgattattacagatcgttactattctcctttaagtacggggacctatgtctactttggcctgaagctttaaccaccctgtgtgtttggaacttgaaaaccaaacttgact

SEQ ID NO: 833 - DNA, 371 bp, Gossypium hirsutum
  Clone ID: LIB3493-053-P1-M1-E4
ccaagcttctattcagttttgtgagagcgatggctaaggacattgaggttggtggtgagttccaggccaaggactaccatgatcctccacccgctccattggtagacgctcaggagttagccaagtggtctttttacagggctgtcatagctgagttcattgccactctcctctttctctacatcactgtcttgactgtgatcggttacaagacccagaccgaccttgctaagggcggtgaagattgtggaggcgttggcattctcggcattgcttgggcttttggtggcatgatttttatccttgtttactgcactgccggtatctctgggggacacatcaacccagcagtgacctttggacttttcttg

SEQ ID NO: 834 - DNA, 394 bp, Gossypium hirsutum
  unsure (1)..(394): unsure at all n locations; Clone ID: LIB3493-053-P1-M1-E5
ctccgctgtgcttttgtctaaccggcgggggactaccggcgtgctaagtatcggcttgaacaccttgtacggacgcataaaggtgccgatgaccggagtttcaggtcaatctaccaggaagaagatgaacaaggtttcaaaggtcttaaagtcagcaaagacctaatggaaatcggcggcgacgccctcaaaaccaacatcacaacattgggtccgctcgtgctcccattctccgaacaactcttcttcttcgccaccctaatttggcgccatttctttggcggcgataaatccaaaacctccctatcaccgtcgtcgaagccatacatncccgactacaagctcgccttcgaacacttctgcgtccacgccgcaagcaagacggtgctagaca

SEQ ID NO: 835 - DNA, 334 bp, Gossypium hirsutum
  unsure (1)..(334): unsure at all n locations; Clone ID: LIB3493-053-P1-M1-E6
cccacgcgtncgctgactttgaggcttacaaggtggatttgcctccatgggaactggttccgacagacagggacaaggataatttgcttcagaagtcagagattaagttcttgaaccaggttcagggccctgaaagcatggcatttgaccctcttggtcgtggtccttacactggtgttgctgatggtcgagttctcttctgggatggtcaaaactggaaggattttgcttatgcttccagcaataggtctgaaatatgtaatcccaagccatcaccacagagttacctgccaaatgagcatatctgtggcaggcctttggggtttccgggttg

SEQ ID NO: 836 - DNA, 390 bp, Gossypium hirsutum
  Clone ID: LIB3493-053-P1-M1-E7
caaatttctctctcattcgcttggcttccgtttggctcaaattcaaaattctctcgcggatcccgctgcgattatctccaaagggatcaacaggtagagaagataaatggggctgtcattcgctaagcttttcagccggctttttgccaagaaggagatgcgaattttgatggtgggccttgatgcagccggtaagactaccattttgtacaagctcaagcttggagagattgtcaccactattcccaccatcggatttaatgtggaaactgttgaatataagaacatcagtttcactgtctgggatgttggtggtcaggacaagattcgtcctttgtggaggcattacttccaaaatacacagggtttcatcttcgtggttgacagcaa

SEQ ID NO: 837 - DNA, 389 bp, Gossypium hirsutum
  unsure (1)..(389): unsure at all n locations; Clone ID: LIB3493-053-P1-M1-E8
gaatggaatgcatggcacaggaggctgtgctctttgaggacattttatgtcagataattgatatgattaagccggaggctgagagctatatcacattgcgtgacctgaagggctctaaactttctggaagtgttttcaatatccttttcaatcttaacaaattcatggcctttgaaactcgtgatccattcctcatacgtcaggagcgtgagaatcctacattgacagagtgggatcgttttgcacatagagaatatattaggctttcaatggaagatgatgtcgaagatgcctctaatggaagtgnagaagtttgggatgaatcacttgaggctcccttctaagttgaataggatgctcagagaagagctcaacacacttatatgctg

SEQ ID NO: 838 - DNA, 359 bp, Gossypium hirsutum
  Clone ID: LIB3493-053-P1-M1-E9
ggtccaaattcgtgttcacagttgagttcgcagcgatgtcgaacgagttcgccgataagggggacaagattatctatgaaaccgaagccaaagggttcaacccgggattgattgtattgctggttattggtggactactgataacattccttgtggggaactacatactttactcgtacgcgcagaagactcttcctcctaggaaaaagaagcccgtatccaagaagaagatgaaacgagagaggctgaagcaaggagtctcagcaccaggggaataggaattcaaggtccgacttttctcttttttcgacattgttaaaaactgttttgttcacaatttctgtccagtttcgagagtt

SEQ ID NO: 839 - DNA, 367 bp, Gossypium hirsutum
  Clone ID: LIB3493-053-P1-M1-F1
ttttaatattcaaatttcaataatcagatagagaagaaagaaaaaacttttgtttccgctttgctcgtcaattacgtggtagatctgggacactgcaatttggttccagagagggaaaactttatgcaaaattcgaattttgtgattttctttttcattctgggtacaaagttaaaaactgacaaaagggcgttgatcgcaattcatggagaattcgagtaacccagatggggaagacacaagaaatcagacaataccttccacttcttcaacatcctcctccgatgattaccgtttgtttgatcgtcaaggttctcttcaccagtttctaggtggtggtaaagcggctgatatactcttgtggaag

SEQ ID NO: 840 - DNA, 387 bp, Gossypium hirsutum
  Clone ID: LIB3493-053-P1-M1-F10
cgaatattctactagacgaggacggcaatgcgaagctctcagactttgggttggctagacaaggacctttggaaggatttggccatgtttctacatcagttgttggcacggtaggttatgctgcccctgagtatgtgcaaactggtaggctaaccgctaagagtgatgtttggagcttcggggtggttctatatgagctcatcaccggaaggcgaacactagaaagaaatctacctcggagtgagcagaaacttctggaatgggtgaaaccttatatatccgattcaaagaaatttcaccttatcatagacccctcccttgaaggacagtattgcataaaatctgctcagaagctagcatcgttggccaacaaatgtctaatgaaaa

SEQ ID NO: 841 - DNA, 378 bp, Gossypium hirsutum
  Clone ID: LIB3493-053-P1-M1-F11
gacacatcggtggctatgtgggcgaaacctgttggtagacgtaaaacgaagattgtttgcactattggtccttcaacaaacacaagagaaatgatatggaaattggccgagactggaatgaatgttgctcgtttgaatatgtctcatggagaccatgcatctcatcagaaagttattgatttagtgaaggaatataatgcacaatccaaagacaacaccattgcaatcatgcttgacaccaagggtcctgaggttaggagtggcgacttgcctcaaccaggtacattaacaactgggcaggaattcacttttacaattcggagaaggggtgggacacctgattgggttcaggggaaatattattattttggtaatggg

SEQ ID NO: 842 - DNA, 265 bp, Gossypium hirsutum
  Clone ID: LIB3493-053-P1-M1-F12
ggcatggatgaggatgccccacctaccggtggcagcagtgccggacctaagatcgaggaagtcgactaaatcaaatatgaagatagtattttgccgatgttttaacagcttctgctggtgctatattttatgttttctgcaacctatgttttgatgtctggaaaaatctggtttatttttgggaacattaccattttaggtaatgaatgttccccgtcttaagaattatatcaacttttttatattaatggttagttttatcttc

SEQ ID NO: 843 - DNA, 395 bp, Gossypium hirsutum
  Clone ID: LIB3493-053-P1-M1-F2
cccacgcgtccggctacatggagctccaatgcatgctcatcaatttcataattatagaggtggccgtgaaagaggacgaggaagaggaagaggaagaggaaatgagatttcacgttcggcaaccaaatttacagaagaatttgacttcacggcaatgaacgagaagtttaacaaggatgaagtttggggtcatcttggaagaagtagccgagctaaggaagatgctgatgatttacaaaatgaagatagtgttgaatcctcgcaagttgaggttaagcctgtatatgtcaaggatgacttttttgattccttgtcctgtgattctcttggaggtgggtcacggaatgggaggactagattttcagagcaaatgaggagggatacagagacctttg

SEQ ID NO: 844 - DNA, 393 bp, Gossypium hirsutum
  Clone ID: LIB3493-053-P1-M1-F3
cggacgcgtgggtttcaaaggatgggtgggaggaacatatgcaagtcaatcatctggctcctgcactgctctcaatattgcttttgccatcccttattagaggatctccaagtcgaatcattaatgtcaattctggtatgcattatgttggcttcgttgatacagaagacatgaatgctgttactgggaaaagaaaatactcaagcctgttgggatatactagcagcaagctagcacaggtcatgtttagcagtgtcctccacaaacggctacctgttgaagctggtgttaacgttgtgtgtgtatcacctggaattgtgcacacaaatgttgctcgggatcttcccagaattgttcaagctgcatatcatttaataccctattttatcttca

SEQ ID NO: 845 - DNA, 265 bp, Gossypium hirsutum
  Clone ID: LIB3493-053-P1-M1-F4
cagagctggctgatattctacaagtcggggggatcgctattagaaaaaaccactcaaagaaacaaaataattggacggggagctctaaacgaaatgctaatacagtatgagatggaatctatactgactaagatcacattgcgctagagaagagaaaacttatattctaaatatctgcacgaattgaagtgaccacctgggatgggacattaaacatcgtaaacatctctgacaacggtctctttcgcatgaggtggacaaacct

SEQ ID NO: 846 - DNA, 392 bp, Gossypium hirsutum
  unsure (1)..(392): unsure at all n locations; Clone ID: LIB3493-053-P1-M1-F5
atcaaatcgcagactggttgtttggtttggaaattgcactaaattcccaaaactgcaaatttcatttcaaaacccttaaagttcaattcctacttcttcttttttatgaacattggagcttgcaaaacaattttctcggtttccagtttgagcgcacaggagaatgttgttcggtcatgctgatggtctatctgaacatcggtcaccaagggaccagctgcttgctggtcctgaatcgctggaagatgatttcaaattagacagttctgaaacgatattgtacgctgcttcttttgaagaactcgccagagataatcttcagtatgacaccatcatatgggtttctatatcgntattgctggttttggcttggggtgttggcatcatcatgt

SEQ ID NO: 847 - DNA, 372 bp, Gossypium hirsutum
  Clone ID: LIB3493-053-P1-M1-F6
gtttctgtctccgattgatctggggctcctaccttttagatctctccctgaagcattaaatcttgagaatggatgataatggtgaaaaagaggaaaatatcccacgtgggattgaatgggaagttgtgtccttaactgcatctgcatatgctgccgctcctggttcaaaagaaggtgaaacaaaggatgataacaagggtgatccatatgaagtcggggaagcagaaacttctcatgctttattcatgtctggtcactttggcttcccccctagcgagcatgagaatttgccattggaacccgagaatagtagtgaacttgtaggctaggacctggttcatgaattaagtgttggaaaacaaggtgggggat

SEQ ID NO: 848 - DNA, 389 bp, Gossypium hirsutum
  Clone ID: LIB3493-053-P1-M1-F7
cggacgcgtgggttgcaagcaacagatccaactgagatgggtcttgatgtgttcaaaagccgtgctaactgaatacggttcttttaggcatttgcaaccgggaagcttccttccttcctacagtatgtctttacttaagtgaaatgtttataggtttcgaaacggcaaactcgggatttccagagttatgccataagacttttatcagtcttgatgatgataaacccgtagtttcgggtatatgtgatttgttatctatagaacctatgtattgagtgcctttgtgtagtcttaatctctttcaacgctaaatgcaactgtttgtgagggttagacaacacatttagttcgttttcaagttttttttttctttaattttctttgaatat

SEQ ID NO: 849 - DNA, 388 bp, Gossypium hirsutum
  Clone ID: LIB3493-053-P1-M1-F8
gctggtgatgatgctccaaggggaggttttcccagtatcgttggtcgtccccggcacactggtgttatggttgggatgggtcagaaggatgcctatgtaggagatgaagcacaatctaaaagaggtatccttactttgaaatatcctattgagcatggtattgtgagcaactgggatgatatggaaaagatctggcatcatacattctacaacgaactccgtgttgctcctgaggagcaccctgtgcttctcacggaagcacctctcaaccccaaggccaatagagaaaagatgactcagatcatgtttgagaccttcaatgtacctgctatgtatgttgccatccaggccgtcctctctttgtatgccagtggtcgtacaacaggta

SEQ ID NO: 850 - DNA, 298 bp, Gossypium hirsutum
  Clone ID: LIB3493-053-P1-M1-F9
ctcaacgctcccctctttgtctatgtctctgtaaattttcagctatgagctcctcccattctctcaaatccacccctctgaaaccgaaagcttgtctcagtctaacctcgaaatcgcccgtttccaaaaccccagaaaaggacttcttccaggttcccaaccgtgctcgtaaccgtgggggcgccctctccatcaaggagatcccgcaaggggcttaaagcccggcttaaccttcgaccgacccgaccaaattgggccggaaacagattttattctgggcccaccaatattcttcacc

SEQ ID NO: 851 - DNA, 397 bp, Gossypium hirsutum
  Clone ID: LIB3493-053-P1-M1-G1
acatggcattgcttgcacctccatcagaggccaaaaaaagttcaggaagtgctttctctttgaaatttgatatgcataagaagaagcatgcaactaggaaagaccgcagtggtgggcaagaaacatggcaattatctcgcttttaccctataatagaggagcttgttgaaaagcttggcaaaggagaactatcaaaggatgattatccttgcatgaatgatcctagtccaacttcccatggcacatctcacactgcatctgtatatgaagctccagttgctcattccatgagatcaaggaggacaccaacatgggctcggcctcgtggctccgatgatgggtattcgagtgattcggtactaagacatgcatcgagtgatttcaagaagttcggcaa

SEQ ID NO: 852 - DNA, 243 bp, Gossypium hirsutum
  Clone ID: LIB3493-053-P1-M1-G10
aaaggaaggagcagcggcggcatgagtagtacgctacaggactatcacataaagcgtaacaaacaaatccccagcgtcaaaagaatcctcctctctcgctttcgctctccgggagagctttcctttcctctctttcggctttcttttaggtatagagtcagcttcttttatctggctcgaacccccagtgaataattataatttggaaggtgaagaaacgaaacagggggggggggtttattt

SEQ ID NO: 853 - DNA, 385 bp, Gossypium hirsutum
  unsure (1)..(385): unsure at all n locations; Clone ID: LIB3493-053-P1-M1-G11
caattgtttgagctagctagctcttactcaaatggcaaccaaaacgatgatgttgcaaatattttcacttttcttctttttgttcagtgtatgcaactccattttccttggtgctaatggagatgacaatggtggttggcaaactgcccatgccaccttctacggtggtgctgatgctaccggcacaatggggggagcttgtggttatggaaacctgtacagtcaagggtatggaacgagcacagcagctttgagcactgcacttttcaacaatggcttgagctgcggtgcctgctacgagctccggtgcaacaatgatcctcaatggtgcattagtcgaaccataaccgtgacagccaccaacttntgtccccctaactatgct

SEQ ID NO: 854 - DNA, 386 bp, Gossypium hirsutum
  Clone ID: LIB3493-053-P1-M1-G12
gatgggaggccaataaagccgttgacgatatgcatgatcggcgccggaggcttcatcggctcccacctttgcgagaaattgatgtcggagacgccgcacaaggtgctcgccttggacgtttacaatgacaagatcaagcatctcctcgagcctgactctctcccttgggctggccgtattcagttccaccgacttaacattaagcacgattctaggctcgaaggcctcatcaagatggcagatctcacgataaatcttgctgccatatgtactccggcagattataatacgcgtccactagacacgatttacagcaattttattgatgcacttcctgtgggtgagtactgttcagagaacaacaagcgtctgattcacttctctac

SEQ ID NO: 855 - DNA, 354 bp, Gossypium hirsutum
  Clone ID: LIB3493-053-P1-M1-G2
gattttacaagttgacaagattgcaaaggatgatgatttgaagaaagcttttaggaagcttgccatgaagtggcaccctgttaagaacccaaataccaaaaaggaagctgaggccaaattcaagcaaatctttgaagctaatgaggttctgagtgacccacagaaaagagctatctacaaccagtatggtgaagaagggttaaaaggccaagtaccaccgcaagatgctggcggacctggtggagcaacatttttccaaaccggaaatggtccaaatgtgttcaaattcaaccccaaaaatgctaatgacatctttggcgagtcctttgggtattctagcccctttgggggaat

SEQ ID NO: 856 - DNA, 393 bp, Gossypium hirsutum
  Clone ID: LIB3493-053-P1-M1-G3
gttttcatcggagaagaaaagtcaaaaaacaaaaatttcatggctcggaaattctttgtcggtggcaactggaaatgcaatgggacaactgaggaggttaaaaagatcattacaacattgaatgaagctgaagttccttctcaggatgttgtggaggttgttgtgagccctccatttgttttccttacctttgtgaaaagtctgttgcggtctgatttccatgttgctgctcagaactgttgggttcgcaaaggtggtgcttttaccggagaaattagtgctgagatgcttgttaatctgagcattccatgggttatcatcggtcactctgaaagaagggctctcttgaatgagtccaatgagtttgttggagacaaagtagcgtatgcactt

SEQ ID NO: 857 - DNA, 368 bp, Gossypium hirsutum
  unsure (1)..(368): unsure at all n locations; Clone ID: LIB3493-053-P1-M1-G4
gtcaaaagatatttttcgactctgatgacgttcatgcctgtattgtaacgtgtggtggtctttgccctggactcaacaccgtgattagagagatagtatgcggcttgttccacatgtatggtgtgaggaaagtttcggggatagatggaggataccggggcttttatgctaaaaatactgtgcatttagatcccaaggttgtcaatgatatccataaacgtggtggaactatccttggcacatcacgaggtggccatgatacctctaagattgttgacagcattcaggatcgtggaattaatcaggtttacattattggtggagatggaactcanagaggtgcatctgttatatttgaggaaattaga

SEQ ID NO: 858 - DNA, 388 bp, Gossypium hirsutum
  unsure (1)..(388): unsure at all n locations; Clone ID: LIB3493-053-P1-M1-G5
ggtctgtttacccgtggtcttcccctccgtattgtgatgattggaactctaactggagctcagtggggtatatatgatgctttcaaagtgtttgtgggactgccaactactggtggtgttgctcctgcacctgctgccgtggagcctgccaaggcatataatgttggaaaacaaagtaacataggattgctggaatggtttgtcaagctggtggaaagatattcttttttgcgttgagaacatatttattaagtcgctctgttttgaaaaaaactattggttntaagaagaagatggttttaatctatcctgcaaaatactggggactaaatagtttttgttgtggtctgatcctcaatggaatttcatttgaagatcaatccccccc

SEQ ID NO: 859 - DNA, 397 bp, Gossypium hirsutum
  Clone ID: LIB3493-053-P1-M1-G6
aaaacccccaaaaattttgaacgctaatggtcttcaatcaaacaaagaatccagccatggggaacaccgagaagctcttgaaccagatcatggagctgaaattcacgtccaaatcgttgcatcgccagtcgaggaagtgcgagaaggacgagaaatccgagaaattgaaggtgaagaaggcgatcgagaaaggtaacatggacggagctcgtatctacgccgagaacgccattcgaaagcgcaacgagcagatgaactacctgcgtcttgcctcgcggctcgatgccggtgttgctaggcttgatactcaagctaagatgactaccattaacaagtccatggctaatattgttaagtcacttgaatcttcattggccacaggaaatttgcagaaaat

SEQ ID NO: 860 - DNA, 390 bp, Gossypium hirsutum
  Clone ID: LIB3493-053-P1-M1-G7
gttgaagataacaggcgtgctctgcgtgagctcctattcacaactccaggagctcttcagtacctcagtggtgttattctctttgaggaaaccctttatcaaaaaaccgcttcaggcaagcccttcgttgatgttttgaaggaaggtggtgtcctccctggcatcaaggtcgacaagggtaccgttgagcttaacggaaccaatggcgaaactttcacccagggtctagatggccttgcacagcgatgccagaagtactatgaagctggtgcccgctttgctaaatggcgtgctgtccttaagattagtgctaatgagccaaccgagcttgcaatccaagaaaatgccaacgggctagctatgtatgctgccatctgccagcaatgtggc

SEQ ID NO: 861 - DNA, 387 bp, Gossypium hirsutum
  Clone ID: LIB3493-053-P1-M1-G8
gaaaatttgaagaaaaaaaatccgtcaccgatctaagttccccaaattctgttcaaatcgccggcgaaattttgatctgaaaatctaaaaatgtcgtccacattcagcggcgatgaaactgctcctttttttggcttcctcggtgccgctgctgccctcgttttctcctgtatgggagctgcgtatgggacggctaagagcggtgttggtgtggcgtcgatgggagtgatgaggccggagctggtgatgaaatcgatcgttcccgttgttatggctggtgttttgggtatttatggtttgattaattgcggtattatcagtactgggattaacccaaaggctaaatcttattaccttttcgatggctatgctcatctttcctctggc

SEQ ID NO: 862 - DNA, 381 bp, Gossypium hirsutum
  Clone ID: LIB3493-053-P1-M1-G9
tggagattgacagaggtgacatctcaccgcaattcgtaacaaatcccgagaaattaatttgtgaattcgagaatgcaagggtgctagtaaccgatcaaaagattacagctattaaggacataattcccctcttggagaagactactcagttaagagctccattgcttataattgctgaggatgttaccggagaggctcttgctacacttgtagtgaacaaactccgaggtatccttaatgttgcagccattaaagctccgagtttcggcgaaagaagaaaagctgtccttcaagatattgccattcttactggtgccgagttccaagcaaatgatctgggttgttaatcgagaacacctctgttgagcagcttggtatagc

SEQ ID NO: 863 - DNA, 394 bp, Gossypium hirsutum
  Clone ID: LIB3493-053-P1-M1-H1
caagtttttagttatgccatggagaacgtgattgtaaggtctggagagaaggatgattctcagtttcccattaaagaaccaaagcttgaagcttccgattccttcaaacatttagcatttgatcaagggaatgcaaattcagttccctcaaatgataaagccaatggaatcgttataccagtaaaacccactataaagctccctaaaccagtgataatgttttctccaaggcccctaagtgagctcgatgctgctgcaactaagcttcaaaaagtctatagaggctataggacaaggaggaatcttgcagattgtgcagttgtggttgaggagctctggtggaagaccttagattctgcagcactaagaaggtgttctgtttcattctatgaaa

SEQ ID NO: 864 - DNA, 336 bp, Gossypium hirsutum
  Clone ID: LIB3493-053-P1-M1-H10
gaattgctgccacttcacaaccgggaccgtgcgcaagcggcccctgcacatcatccagtcatcatgcaaacgttattggtaccgccggcaactcgctccggcatttgtttggtggcggtgggtccccttctttcaactcaccgacgccgaccagcgataactttttcttctccaaattttatcgcttcacttgaaactcggaaaccgaagccactaatctccccgttcgctttctggaaccctctcagtgttgaaagatctaagcttttgttgagcagaagctcttctccttcttcttcctcaggttcacctggttctaccttccctaatgatgat

SEQ ID NO: 865 - DNA, 322 bp, Gossypium hirsutum
  Clone ID: LIB3493-053-P1-M1-H11
aaagaaaccttgcgctcggtctgcgataaattctatagaaatccaagaaaattttttttaaaaaaccctaattctataaaaagatcgaattaaagtagaatcagaagaaaaatcgccgaggaaaacaagatgtcggggcagcaagaagaagataagaaacccggcgatcagtccgccgctcacatcaacctcaaagtcaaaggccaggacgggaatgaagttttcttcaggatcaaaagaagcacacaattgaagaagctcatgaatgcatattgcgaccgacaatctgtggatttcaactcgattgccttcttgttcgatg

SEQ ID NO: 866 - DNA, 65 bp, Gossypium hirsutum
  Clone ID: LIB3493-053-P1-M1-H12
cggacgcgtggggtttctttcagcgttcatctccttcttcttctcctacttgtcatgcatgggga

SEQ ID NO: 867 - DNA, 383 bp, Gossypium hirsutum
  unsure (1)..(383): unsure at all n locations; Clone ID: LIB3493-053-P1-M1-H2
atcttgtttaaaatataagaaaagaaatcgtacgcaatgagcactgctggtcaggttattcgttgcaaagctgcggtggcatgggaggcggggaagccactatcgatagaagaagtggaagtggcaccaccccaaaagcatgaagtccgtattaagattctcttcactgctntatgtcacactgatgtatactactgggagtgtaagggttacactcctctgtttcctcgtatacttggtcatgaagcctcatggatcgtggagaagtgtgggtgaaggtgtaatgatttgaaacctggagatcatgtgctccctatctttaccggagaatgcaaagaatgtcggcactgtctgtcagaagaaagcaataacatgtgcgaact

SEQ ID NO: 868 - DNA, 392 bp, Gossypium hirsutum
  unsure (1)..(392): unsure at all n locations; Clone ID: LIB3493-053-P1-M1-H3
ggggagagaaggctatgcagcttgttgagagcggtttgaaggtcaaggaatatgaccttttgaggaggaacttcagtgatactggctgctttggattcggcatccaggagcacatcgatcttggaatcaagtatgacccttcgaccggtatctacagtatggatttctatgttgttctagaacgagcntggtaccgtgttggccgtcgtcgcagatgcaagtcacgtgttggtattcagcacagagttacaaaggaggatgccatgaagtggttccaggtcaaatatgaaggtgtcatccttaacaagtcccaaaatattggagctttaaagtagcagtatgagattgtttttagttttgagtacctgattttggctagtttatatttatca

SEQ ID NO: 869 - DNA, 367 bp, Gossypium hirsutum
  Clone ID: LIB3493-053-P1-M1-H4
gagcaaacttgtatgttaagaatttggatgacagcataagtgatgaaaaacttaaagagctattctctcaatatggtaccataacgtcatacaaggttatgcgagatccaagtgggataagtaaaggatcagggtttgttgcattttcaactccagaagaagcatcaagagctcttgcagagatgaatggcaaaatggttgtcagcaaacctctctatgttgcaccagctcaaaggaaggaagataggagagccaggttacaggctcaattttctcaaatgcgaccagttacaatgtcaccttcagtcgctcctcgtatgccaatgtacccaacctggggtccaggtcttgggcagcaaatatttta

SEQ ID NO: 870 - DNA, 367 bp, Gossypium hirsutum
  Clone ID: LIB3493-053-P1-M1-H5
atcaccaacaaaatcagttgcttgacaagggcctctacaaccatggctctttcttccccatcattcgccggtaaggcagtgaagttctccccttccacccctgaaatccggggaactggccgtgtttccatgaggaaaaccaccaagcctgttccttctggtagcccatggtacggtcctgaccgagttttgtacttgggtccactttccggtgagccaccatcttacttgaccggtgagttccctggtgactatggttgggacactgctggactctcagctgatcccgagacctttgcttggaaccgtgagctcgaagtcattcactgcagatgggccatgttgggagctcttgggtgtgttttcc

SEQ ID NO: 871 - DNA, 361 bp, Gossypium hirsutum
  Clone ID: LIB3493-053-P1-M1-H6
acggggtgcttcacaatcacatgaggactcgaggcatcctcaagactcgaaaccgaacttagaaaacaatagggtcgagttgaaaaacccagaaagcaacatctcgattcgaccgatggagaaaaaaatggacttcgttgattcaaaatcatcaaaaaaacctgagaaaacccaagttccatataattacgaaacaatattgagagatgtcgatttgcctatcgatacgtccactatggataagttgatttctcagctccattatggtgttttcttgaaccaaaagagaaagaagtattgggttgataagaacaacaagaattgtttcatgttatttgcaagagatttatcaattacttgg

SEQ ID NO: 872 - DNA, 371 bp, Gossypium hirsutum
  Clone ID: LIB3493-053-P1-M1-H8
aaattatgttcgagacctgcaatgcccctgctatgtatgtagctatccaggccgtgctctcactttatgccagtggtcgtacaaccggtattgtgatggactcgggtgatggtgtcagccacacagtgcctatttacgagggttatgccctcccacatgccattcttcgtcttgacttggctggtcgagacctcactgattacttgatgaaaattctgactgagcgtggatattccttcaccaccaccgccgaacgggaaattgtgagagatgttaaggaaaagctgtcttacattgcccttgactatgaacaggagctagagacctcaaaaacaagttcatcagtagagaagagctatgagttacctgat

SEQ ID NO: 873 - DNA, 386 bp, Gossypium hirsutum
  Clone ID: LIB3493-053-P1-M1-H9
ttcctttcttctcttttcggttgggtccctctctctttcaaaacccaaacttgggtcctcattattaaatcttctctcccaagcaaatcctttcctcctcacctcctttcattcccctgttttcctctgtttttcttggtcatggctgagttgatggacgatgctaagttttggttgccggcgaagtttttaaccgacgatgatgttcttatgaagaaagggaaattcgagaacgaaatccgtggaaaaaagggtactgagttgttggtatctagtcatggtttcccttctgagttcccttacgagtttgactccttctcgcctttgagttcacccgttgaatctgttgttgggtctacggagactgaaagtagtgatgaagatga

SEQ ID NO: 874 - DNA, 111 bp, Gossypium hirsutum
  Clone ID: LIB3493-054-P1-M1-A1
gcaagaacaaaagtattttgatgacatggttcaaaaatgcaaggaggttggtgccacattggttatctgtcaatggggatttgatgatgaggcaaatcatttattaatgca

SEQ ID NO: 875 - DNA, 379 bp, Gossypium hirsutum
  Clone ID: LIB3493-054-P1-M1-A10
gagaaagccaagatcctccgtgacaaggtcaggtggtgctaccgcatcgaaggggtcaaccatctccagaagtgccgccatctcgtacgccagtacctcgacgccacccggtggcatcggttggggcaaggatggccgtcatccctccctccacggtccaaaggttgaagagatcgattcagaatgaatggctgcatctggtcatgataggtgactgactttaggcagcaaagtaaggagtgtgggattcgaataattgtccacctacattgtcactattggtttttggggtgaaagactcttataccaaagatcaaacgtaatgccctcttctttttcccatttggttagcatccaaaaacttggtaaattacttggg

SEQ ID NO: 876 - DNA, 366 bp, Gossypium hirsutum
  Clone ID: LIB3493-054-P1-M1-A11
ggaaaacgaagatggaatctgggaattacagttctttgattccaacgtttcaaagtcagtaacagtcgatgatattacactctctgcaaaacaagtaaatggtatttgcagaggcaataaatcgtctgcaaatgatttccaattcgtggtgaaagaaatgaacgacgtcaactcaattccatcgagtttttggtctgaaatcaaacaactcggcaagcttcagcatccaaatcttgttaatctgatcggaacatgccggtcggacaagaatgcatatttggtttacgagtacataaaagggaaacttttaagtgaaatccttcacgaattaacctgggaaagacggcgtaaaaatcccatggggat

SEQ ID NO: 877 - DNA, 250 bp, Gossypium hirsutum
  Clone ID: LIB3493-054-P1-M1-A12
aaaagatctggtggtgggggtgaccaacttttataatcagtataagagtattgaaccgtggttgaagaggaaaaacccgccgtcgacggcgggaaaagagattccgcagagtaaaaaggatagagctaagctagatgggatgtatgagtgtattttgcgtgcttgctgtagcactagctgttccagctttaggtggtatactgatgtctatttatggcttgctgctttgcttcatgctaacagatgtata

SEQ ID NO: 878 - DNA, 357 bp, Gossypium hirsutum
  Clone ID: LIB3493-054-P1-M1-A2
tgcaaagtacacagtgcaggggttggaacaaatgctcctttctctttttctaccgaggcgggaaaggtacggcagtttcaaaggtaggccaacaggcagcaaaattgataatggggtagatcttcgccggactgcatcagctgttgcgtgattgtccaatctatttatgtcgcgggggttaaaatgttcatgttttagaggtttaatcttatatcttgtacatatcagcgttcttagggcggaggtggaactattctctatcattcatactttgcccttggacagcacatgctttggacatttgacatttcattactcaaggagtcgcccgaaattgatgtgtgaagcaaattttgc

SEQ ID NO: 879 - DNA, 375 bp, Gossypium hirsutum
  unsure (1)..(375): unsure at all n locations; Clone ID: LIB3493-054-P1-M1-A4
caaaaatctctctttttcttcttgatttttcaacatcaccttctcacgcgccgccgccgcctactcttncgccggcgggaaatatccattcccttttctttcccttccctctcctcccttttattaaaaaaagaagaaaaaaaagtcaccaaaacaaaacaaagtttgcttctttaggaaaggtttttttcaaaagcacttgagattttaccatatcatttattatcacaattattttactcgttagggtttgtttgattaataacaagaggagagggaagaaagaagaaaaaaacccaaaaaaaagaaagagaaggaaagagaaaaaagagtttttttgggtgggttttagctgttgttttaggggttaccaag

SEQ ID NO: 880 - DNA, 145 bp, Gossypium hirsutum
  Clone ID: LIB3493-054-P1-M1-A5
gtttggttgcttgaaaatcattggccagggaaattttttttacaaaacactggaaaaggacggttttttttaaggagaatgtcttacccatctcgaaatctgtcagacattttccagaaattgactcttcttttgccctttaccc

SEQ ID NO: 881 - DNA, 377 bp, Gossypium hirsutum
  Clone ID: LIB3493-054-P1-M1-A6
ctcgaagcttccttttccgttttagatctcaaaattcaaaaggctctctttttcatctcatggctgctactattgtctccgtcaaagctaggcagatcttcgacagcccgggaaatcctacggttgaggttgatgtggaaacatccaacggtataaaggctagggccgcagttcctagccgtgcatccactggaatttacgaggctcttgagttgagagatggaggttccgattaccctcgtaaaggtgtatcgaaggctgttgctaatgttaacacaatcatcggccctgcattgattggaaaggacccaaccgagcagactgcaattgacaatttcatggttcaacaactggatggaactccaaatgagtggggt

SEQ ID NO: 882 - DNA, 224 bp, Gossypium hirsutum
  Clone ID: LIB3493-054-P1-M1-A7
ttctgatataggaagaaagccaagtgctttgaacccaaatatggaaattcagagaaccttctccactacaaagcaaactaagacatactttgaatcgtctctatcgaactcttccgatccctttccaaaacactcgataatgaagtcggaatgccatcattccatagcccagatcttttgcttcttcgcccttccgctgccaaagcataggctgcagcattaac

SEQ ID NO: 883 - DNA, 381 bp, Gossypium hirsutum
  Clone ID: LIB3493-054-P1-M1-A8
gttcattaaaaaaaaaaccctctctttactggaaaatttcttgactttcttctattctctagcagaaatgctccttaagcttcccgggttgtgttaaaaagaaaaatccaaactttttttagctcttttgaatcatgggtaatagcttgatttgcaggacaaagaaagatgctaaagataatggatcgaaaagcaagaggatgggaaagtctcaaaggaaaatgcttgcagaagaagagtttttgcataagcaagctttgtctatggctcttcatcaacaccagttgtctcagagatttgatggatccatgtctaggagaattggctctaccagctctagaaggcacgctgatccattagctaatgagaaaaagctactgg

SEQ ID NO: 884 - DNA, 380 bp, Gossypium hirsutum
  Clone ID: LIB3493-054-P1-M1-A9
cacgattccacctgaagctagtgattttagttcatggagaaacctcccgaacactgattttgagctcgagagacctccaataatgaagagcgtactcaatttatctactcaatcttcgagccatatgtacagtgatggcactgacttatcacttgtgagcaacaaaaggaggaaagacgatgattgctatttgccagtcattcctccatccgaccgaatcccagacatggaaattcatcctagtgaaccacactgggtaaatgacctcaacggggtaatgaaaaacgcctaccggcccgttacccctgccaaagccatctatgaggatgaagcccgttacttgatcattatcagcttgccttttgttgatcttcaaaggg

SEQ ID NO: 885 - DNA, 149 bp, Gossypium hirsutum
  Clone ID: LIB3493-054-P1-M1-B1
gtttacgccgatgtcaacgttatggcgtgctaaagaatattgggactactagctcctcactgttcaatggggcgaacaagatgattactaagtggtgaggaaaagtcggcgaaggaaatacagtgagggtttcgaggggggtcatatta

SEQ ID NO: 886 - DNA, 380 bp, Gossypium hirsutum
  Clone ID: LIB3493-054-P1-M1-B10
cttttagctgtacttgatgagcgtgaatctttgaaaccaaaggttcaccggagaattgaagaactaaataaagctcgtgcaggggctaaattgcttgaacctgatggctataaaacctcttcctatggctccgagaagacatcacctttggagtggccccatgtaaataaaggatctagtatgaacttggctattaagcagcctgccaacatggctgttcaatcttcatggaagtataacaatgattgtaatcaatttgacaagcagctccagaagttgtctctcaatataccacttccaaataaagaaacattgtctagacactcgtttcttggtcctaatggtcttcgaggccagtggcttggacctagtgctgagat

SEQ ID NO: 887 - DNA, 347 bp, Gossypium hirsutum
  Clone ID: LIB3493-054-P1-M1-B11
acaatttggagctgtagtgtgatggatgctctccctttgcaaatcgagggcgagcactctccttcctctttccgctgcttctgctttcgcattcggttcttgcaaagaaggctggtactaccgctgccttggccttgacccataaacaaccccacctcaatacctctattcctttccaccaataacccagatttgttttttttttgttatacgccccacaaaataacaaaacaaacccttgtttctcttttctcggttggtggtgaattattcattcacctgtttttggttttgattctttttcattttgaattttgaacaaaatttttttgaaagaatgttgcttt

SEQ ID NO: 888 - DNA, 350 bp, Gossypium hirsutum
  Clone ID: LIB3493-054-P1-M1-B12
gttttgagattgcaatggcagtgctcaattcttgtaagcttgtttggatctgcgccgtgatcgtggcggcggcgttgatggtggcagttgatgcgagcggtgaccaccactaccacaaccagcaaatcctgggttggattccgaccccgaccagatcttcttgcaatggttccataggagaatgcttaggaggggaagaagagtttgagctggactcggagatcagcccgcgcgttttacaaaccaccatgtacataagctacggcgcttttcaaaggaacaccgttccctggtccccccgtggtgcttcctattacaattgccagcctggagcttaggctaacccttac

SEQ ID NO: 889 - DNA, 91 bp, Gossypium hirsutum
  Clone ID: LIB3493-054-P1-M1-B2
tcggacgcgtgggccggtggctcagtgctgttggattttgggataccattcttttatttgggctgctttcattaatgagcctttgggtttg

SEQ ID NO: 890 - DNA, 323 bp, Gossypium hirsutum
  Clone ID: LIB3493-054-P1-M1-B4
gaaagtgcaatactctggagatcgattgtgcgaatgtcaaagcaaaggtggctgtcggactctgcagaattcaccttcgtttgacacggttaacctcgatggaggcttgcaagaagtatggattttacttgctatggcgctaggctaccgattgtgtgcttacttttgcctgcgcaaaagaatcagtggatgtcatatttgagcaggattctactttgctgataaatatgtaacagaagagaaagttcgaggggctttgattactcctcacctgcaaacttttgaattccaacatgtgcagaagttatggtacaatgttaagt

SEQ ID NO: 891 - DNA, 385 bp, Gossypium hirsutum
  Clone ID: LIB3493-054-P1-M1-B5
ctatatttgcggatatacaaatagggatgaaccccatggacatgatcattggaggtggatctccggtgggaacggacccagctaaggtacctagaatcggaatcatccctcgatatgcaaaagacgagtcggaaatcaggtggtttgatgtgcctggtttcaacctcatacatgccatcaatgcatgggatgaagatgatggcaacgccatagtcttgctggcacccaacattctatcagtagagcacaccctggagagaatggacctggtccatgccttagtggagaaggttagaatcgacttaagaacagggctagtaacaaggcaccccatttcagcaagaaatctggatttcgcagtattaaatccagcttatgttgcaaa

SEQ ID NO: 892 - DNA, 80 bp, Gossypium hirsutum
  Clone ID: LIB3493-054-P1-M1-B6
caaaaatatcatgcgtttctttgcctaatcaatcaaatcttggtctggtgttctctttacttcttccgagttaaaggaaa

SEQ ID NO: 893 - DNA, 367 bp, Gossypium hirsutum
  Clone ID: LIB3493-054-P1-M1-B7
ggaaaagcagttgattgcagctatatccgtggtcccaagtacttagaagttgatattgacataggttcttctacggttgctaatggagttttggggcttgtcattggtgtaatcacaacattggtggttgacatggctttccttgtacaggcaaatacaacagatgagctgccagagcggctaattggtgcagttcgtgtttctcatatagagctatcgcctgccatagttccgaagctggatgctgatccatcatgattgtattgaccacacacagttcatctatacggattatttgttctaatatttcattcacatttcctcttattattcaacattacaaaaaggaagccgccacttttgtttt

SEQ ID NO: 894 - DNA, 278 bp, Gossypium hirsutum
  Clone ID: LIB3493-054-P1-M1-B8
agaaaatgaaagaaagtggagggaaatttagacaaaaaaccaaactgaacccagaaaaaacagcagacaaaacagtgtgtgtgtgtgtgtgtgtgtgtttttctggttcagtgtaagaaagaaagacaagagacatagagagaatttctgggtttttttgtctcctttttttttgttcttcgttttccatctagaaaaagagatatatttagccatttgatcggattacagttagggtttacttgggggttgctgtttgtaccgtgaatggatgcggt

SEQ ID NO: 895 - DNA, 194 bp, Gossypium hirsutum
  Clone ID: LIB3493-054-P1-M1-C1
cgtatctgaattttttctttttcggggtctccaatttattctattccaattctgatggattggatgaggttcattctatgtcaacttcctaggtggggtattacctacaaggtggaaccaaaatattctgtattcctatatagataacaagcgctccaaatagccagaaaggaaaaaaatggggagggttcttc

SEQ ID NO: 896 - DNA, 374 bp, Gossypium hirsutum
  Clone ID: LIB3493-054-P1-M1-C10
cggacgcgtggggttccgggtgtctgtagaggtctggtctactcaacactctctcctccctcttagcaaccaaagactcagatccgctcggatttctttgtcccagaactagaatggagacctttctattcacatcagagtccgtaaacgagggacaccctgacaagctttgcgaccacggtctctgatgctgttctcgatgcctgccttgcccaggaccctgacagcaaggttgcctgtgaaacatgcacgaagactaacatggtcatggtctttggagagattaccaccaaagccaacgtagactatgagaagattgttcgtgatacatgccgctccattgggatttgttctgatgatgttggtcttgatgc

SEQ ID NO: 897 - DNA, 232 bp, Gossypium hirsutum
  Clone ID: LIB3493-054-P1-M1-C11
tttagtctttttggttgagcttttttttttcggggggggttttttaaaatgggtttttattatttttttattttcatatttttcttttgattttttttttttttttttctttgtttatttattttttttttttatttatttttttttttttttttttttttttttttttttttttttttttttttatttttttttttttttttttttttttttttttttttttttttttttt

SEQ ID NO: 898 - DNA, 373 bp, Gossypium hirsutum
  Clone ID: LIB3493-054-P1-M1-C12
caaaaggatattttgaacgtgggctacatctgtgagtgcaatggcctcccagaggttgcaaactactggaaacaagtcattaagattaatgactaccagaaaactcggtttgtgaaccggattgtttcctcaatgtttaacacagtttcagggaagaagattgccattctcgggtttgctttcaagaaggataccggtgacactcgggagaccccagcgatcgatgtatgcaaagggctgttgggcgacaaggctctgctgagcatatatgaccctcaagtcaatgaggagcagattcagagggatcttgcaatgaaaaagttctactgggaccattcggttcattttcagccgatgaaccctactttgatca

SEQ ID NO: 899 - DNA, 375 bp, Gossypium hirsutum
  Clone ID: LIB3493-054-P1-M1-C2
ctcttcttttgatctctggcgggggggggatccccaagtaaaagtgcccttttcccttttactcagaaaattcgcccccaaattcacccctcttctctgcctcgtcttagtaaatcagtttttttcttctcatctcagttctcgcccaccgccgtctctgctgatttttttcggatctgacctgtattccgtgtcggatcgtgttggcataggtactgcaccccaaattgccgagtcaagttctcgcccaccggctccgctggtttttgccagatctgacccggataccgtgtcggatcgtgtcgacacaagtactgcattccaaattgctcccagcccagtttggatgcaaagatggttcaaatggctcaaatg

SEQ ID NO: 900 - DNA, 352 bp, Gossypium hirsutum
  unsure (1)..(352): unsure at all n locations; Clone ID: LIB3493-054-P1-M1-C3
caccagagttggagtatggtagagatgagatattggaagccgaccatcaaagcggaagccaagtgggggtatcgaatctcttcgtgcaatcccatggatctttgcgtggacgcagacgagattccatctccctgtttggctcggatttggagctgcatttaaacatgtcattcagaaggacattaagaatctccttatgctgcaggagatgtacaatgaatggcctntcttcagagtgacaattgatttggttgaaatggtctttgcaaaaggagatcctgggattgcagccttatacgataagcgtttttgtttctgaggaactctggtcttttggagagcggttgaaaac

SEQ ID NO: 901 - DNA, 369 bp, Gossypium hirsutum
  unsure (1)..(369): unsure at all n locations; Clone ID: LIB3493-054-P1-M1-C4
gtgactattggctttagagacacgaaacacatggggaatgcatcaggattggcagtgatgactgtgatgttggtgacgacatgtctcacatccctggttattatcctctgttggcacaaaccctctattgtggctcttttttttcttcttttctttggttctattgagttgctntacttctcagcttcactcaccaagttcactgaaagggcttggctccctattctcttggcccttttccttatgaccatcatgtttgtttggcattatgcaaccatcaagaaatatgaattcgatctccacaataaggtatcactagaatggctattagcattgggtccaagcttaggaattgctcgagtaccgggt

SEQ ID NO: 902 - DNA, 284 bp, Gossypium hirsutum
  Clone ID: LIB3493-054-P1-M1-C5
tgccattgcccaatttccttttgcaaccattagtggatgcctgcctggcttggctcaaatcttagggacttatttgtaggcaagacaaaaaagaacatgggcttacaagcttaatatttggatagatatgcttaaaatgagcaattttgaggactacgtcttactctaacttttttgttgtttggggtggttttttccacttcgttgctatttggagatgggtgaataaagaagttcctttgtttgcgagacgtggttaaaaaaaaaataaaaaaaaagggcgg

SEQ ID NO: 903 - DNA, 380 bp, Gossypium hirsutum
  Clone ID: LIB3493-054-P1-M1-C7
tagacattgaagaagagatgaaaagtatggagggaattcaacacaaaacagtgagcgtcaatggcatcaacatgcacatagccgagaaaggggaaggtcctttgattctcttcatccatggcttccctgagctctggtatacatggcgccaccagatcaacggtttagctgccctcggctaccgtgctttggcgcccgacctccgtggttacggtggaaccgatgcgccggattgcgtcgccgattacacttgcttccacgcggtgggagacctcatcgcgcttctggacatggaggcgccgccggagaaggaggataaggtgttcgtcgtaggacacgattggggtgccatcattgcttggttcttgtgcttgtttagg

SEQ ID NO: 904 - DNA, 374 bp, Gossypium hirsutum
  Clone ID: LIB3493-054-P1-M1-C8
gaaaaagggagaaaggtgagggcgatgccgatggaattcgtgacggacccagacgaccaaggttcagccatggaagtcgacaatgttgacacacgggagatcttcgacgaaggcgtcgtcgcttccgacaaccagctcgccaatgccgatttcttcaactaaaaaaacaaagaagaatcgtttcaagtccttgggttcaactacataatacaaatcccacctctgaacttcatttttccttcaaaataaagcttcgatttgatcttttttagtgagacaaatggctgaaaatcttatgcctgctttacaatataacaactatggcggaggcgctgcttctttgaaaggacttttttataacgctgggaattttt

SEQ ID NO: 905 - DNA, 380 bp, Gossypium hirsutum
  Clone ID: LIB3493-054-P1-M1-D10
ccacctttgaaagaagctgctaggttctctgttaaaagcaacaaaatcaaaacatggcaaagcgtttaatcccttcattcaatcgcgttttggtcgagaaaataattcctccttctaaaaccacttccggaatcttacttcccgagaaaacctctaagttgaattctgggaaaatcgtagcagttggacctggagcacgagacaaagatgggaaattcatcccacttaatctaaaagaaggagacactgttcttttgcctgaatatggtggcactgaaatcaagctcggtgaaaaagagtatcacttgtatagagatgatgatatattgggaacacttcatgaatgatttcaaacactgccaacttttgaagaaatgaaa

SEQ ID NO: 906 - DNA, 365 bp, Gossypium hirsutum
  Clone ID: LIB3493-054-P1-M1-D11
gaagctttcagatttcgggctggctcggcaaggaccccccgaaggatttgggcatgtttcgacagcagttgtcggcacagtaggttacactgcccctgagtacgtgcaaaccggcaggctaactgccaaaagcgatgtttggagcttcggggttgttctatacgagctcatcaccggaaggcgagttttagaaagaaacctacctttaagcgaacaaaagctcctagaatgggtgagaccttacatatcagattcgaagaaatttcaccttattgtaaacccttccctcgaaagacagaattgcctgaaattcggtcggaaactagcatccttagcaaacatatgtctaatgaaaaactgttaat

SEQ ID NO: 907 - DNA, 379 bp, Gossypium hirsutum
  Clone ID: LIB3493-054-P1-M1-D12
gaaagaaagaaaacatgtctcttgtgacagaagagataaaagcgagtgcatcagagatttaccatggagatgagatatgccaagagaaatccaagtttttgttggaggaagtaggcatgccaagggggcttttgccacttagagacatcgaagaatgtgggtacgtgaaggacacaggtttcgtgtggctcaaacaaaagaagagcatcacccacaagttcgaaaagatagggaagctggtttcctatgcaactgaagtcacggctgtcgttgagaaaggcaagatcaagaagctgactggggtgaagaccaaagagcttttggtttggatcacactgagtgatatccaagtggatgatcctcccactgggaagatcac

SEQ ID NO: 908 - DNA, 376 bp, Gossypium hirsutum
  Clone ID: LIB3493-054-P1-M1-D2
attgaactattctttatttacagagaggctctccctttttatatattatttatcaaacaagggccataagaaggtgattcaagtgaaagaaaaagaaaaaaacaaaaaacaaaatcaaagatcttaaaagaagaaataaaaccaattctacttagctgaaatgaagccaagtcggtgaagttcaacgtgaagaaaagtgagtcaaaggtgaggttacagggtcaagaatgtggaaggaaaggaaaattagctattgctgctgacatatttgcagtgacgccatcgtttttggttgtcgaagttaaaaaagacaacggcgataccttcgaatacaaccacgtttgcagtaaacagctcccgccggcgcttcaagaca

SEQ ID NO: 909 - DNA, 372 bp, Gossypium hirsutum
  Clone ID: LIB3493-054-P1-M1-D3
agaaaaaaagagagatggcgtgtgggggaaaatctgcaatcttaattctgtcggtgtttttatctgtacgcttcagttcgggtgttaggttgctccaggaacagcccaatgatgaccccaaaaacatggacgctattcctcccattgatgcactcaaccctaccgagttgaatggacccggtgttggcattcacgaagatcatgttgtcccaaaaggtgctgaaattggtactcttggttttggttttgaaggtggtcctgataaatgttgttcttctggatgttccggtaattgtaatcctggtgggtacgttctaccatttcctcaaattccagaaatccgaagaattccagaaatcccacatatcccac

SEQ ID NO: 910 - DNA, 382 bp, Gossypium hirsutum
  Clone ID: LIB3493-054-P1-M1-D4
tagaggtctggtctactcaacactctgtcctccctcttagcaaccaaagactcagatccgctcggatttctttgtcccagaactagaatggagacctttctattcacatcagagtccgtaaacgagggacaccctgacaagctttgcgaccaggtctctgatgctggtctcgatgcctgccttgcccaggaccctgacagcaaggttgcctgtgaaacatgcacgaagactaacatggtcatggtctttggagagattaccaccaaagccaacgtagactatgagaagattgttcgtgatacatgccgctccattggatttgtttctgatgatgttggtcttgatgctgacaattgcaaggtcttggttaacattgagcagc

SEQ ID NO: 911 - DNA, 374 bp, Gossypium hirsutum
  unsure (1)..(374): unsure at all n locations; Clone ID: LIB3493-054-P1-M1-D5
cattttcagtacttccccattaacactaaagcttcctgtttacttttatctcacttcagagacaacccttttttttttcctttctttcttttgttatcaaagattcaaactttgtgtgtttttttctctattctggctctcccaacaatggaagctnntagcttgcttaagtattggagaggggggtggtggtggtagtaaatggttgtgttaatgcacgttctgcagccacagccgggggcacgactacgattgtgacggcggtgagtactcgtcaggtggtggatacggatgatgatgatgacgatgatggccctttctttgacttggagtttgcggttcctgatgaggacgaaacagaggggagttgaaag

SEQ ID NO: 912 - DNA, 379 bp, Gossypium hirsutum
  Clone ID: LIB3493-054-P1-M1-D6
acagaatccacccgtttctaaagaaccgaaccaagacccaagccagggagtatgttcggttcccaaatgttgtacggaaagtaagagaatatgagatctccccctcccttttcagttcttcgttctcttcttcctcttcgtcttcaacggcgtcgtttgggaagctgggttttgttgggtggtatttaggaatggtgaagtccgggcccgttttaaccaagagcgttacttcatcggctatttatgtagctgctgatttgtcttctcagactatttcgaagtcatcttcagaaccttaccatttggtgaggacttttcgtattgggggataccggttgttaatattaggaccatcactgcattcttgggtcaacttgat

SEQ ID NO: 913 - DNA, 379 bp, Gossypium hirsutum
  Clone ID: LIB3493-054-P1-M1-D7
ggtttggccagtctgctggtttggttgcctctacacttatggaaaatggtggtgtccctcagtctgctacccccgaaacacttcttaaggaagcaattcatgttatcagctgtggatacgaggacaaaacagactggggaagtgagattgggtggatctatggttctgttacagaagatattcttactggattcaaaatgcatgcccgtggttggcggtcaatttactgcatgccaaaacgcccagcctttaaaggttctgctcctatcaatctttcagatcgtctgaaccaagtgcttcgatgggctcttggttctgtggaaattcttttcagtaggcattgccctatctggtatggttatagtggtaggctcaagtg

SEQ ID NO: 914 - DNA, 375 bp, Gossypium hirsutum
  Clone ID: LIB3493-054-P1-M1-D8
ctttgggtttgaaaaatggagtgcaacaccaaaatgtcagctcttcttttgctttgcatgcttttcatttcttcagtgacaccaattcttgggtgtggttcatgtgggaaagcaccacacaagcatcgaaagcctaagggaaagtcccctaaaggtcccatcactttgcctccccttgtgaaacctccaatcaagttgccaccggttgttcctccaatagttaagccacccattgacctccctccggttacagtccctccaattaacctccctccagggacggttccttcagtaactaagccaccaagtgggaaaccctgcccaacaccaccaaccaaggacacttgccccattgacacactgaaattgggtgct

SEQ ID NO: 915 - DNA, 380 bp, Gossypium hirsutum
  Clone ID: LIB3493-054-P1-M1-D9
ggaactttcacacaaaacacaagcagcagctgcagtagcatcctcaattgctgaggaatcttttggagccattcgaacagttagatcatttgctcaagaaggttttgcaatatcaaattacactgaaaaagttgacgagacactgcagctcggactaaaacaagctaaactagttggtctattctttggaggagtaaatgctgcattcacattttctgttatggccgtagttttctatggtgcctacttgacaataacaggatttatgactgtgggttctctcacatccttcatcctctatagcctcactgttggatctgcagtctcctctttgtccgggttatattcaactgccatgaaagctgcaggcgcaagtaggg

SEQ ID NO: 916 - DNA, 179 bp, Gossypium hirsutum
  Clone ID: LIB3493-054-P1-M1-E1
tctacccctcttcttaggtctgcgtggtcttagttcttgattaattagccaatcacagcagcaatgtctctcctcaatgatctcatcaacctcaacctcagcgacaccactgaaaagatcatagccgaatacatatggatcggtggatctggtatgggtctgagaaaccaagcaaggac

SEQ ID NO: 917 - DNA, 114 bp, Gossypium hirsutum
  Clone ID: LIB3493-054-P1-M1-E10
ctttttggcaatcaattggggaagcaagtatggctaaggacgttgaggttggtggtgagttccaagccaaggactaccatgatcctccaccagctccattggtggacggggagg

SEQ ID NO: 918 - DNA, 218 bp, Gossypium hirsutum
  Clone ID: LIB3493-054-P1-M1-E11
gatgaattgagagatgctggtgggcttgtatttgccaacaagcaagatcttcccaatgcaatgaatgctgcctaaataactgataagcttggtcttcattctctccgtcagcgccactggtatatccagagtacgtgtgcaacttctggggagggcctctatgagggccttgattggcttttcagctacattgctagcaaggcatgttaaagggatct

SEQ ID NO: 919 - DNA, 334 bp, Gossypium hirsutum
  Clone ID: LIB3493-054-P1-M1-E12
cggacgcgtgggcgaaggattaagaccagaacaacaatggcgttagccgctacatacaaaatagttctcggctcaatagcctttgcaatcttctgggtattagctgttttccctgccgtcccacttttaccaatcggaagaaccgccgggtctttactcggtgccatgcttatggttttattcagagtaataaccccagatgaagcttacgccgccattgatctaccaatcttgggtcttttattcggcaccatggtcgttaggtgttatctcgaaagagccgatatgtttaagtatttaggtaaattgctttcatggaaaagtaaaggagctt

SEQ ID NO: 920 - DNA, 367 bp, Gossypium hirsutum
  Clone ID: LIB3493-054-P1-M1-E2
ctctcttcctaacaattgagcaaggtggtgttattttctctctcgacaaacaatggaagcgttctttgaatctcgatcgagaagcaactggagttacgatacactcaagaatttccgtcagatttctcccgtcgttcaatctcatctcaaaagggtttatttgaccttatgttgtgccctggttgcctctgcttttggggcttatcttcatatcttaaggaacattgggggttacctcacatcattcgcatgcttcggaaccatgatttggctcctctctatcccttcttatcaggaaccaaagagaggttcccttctgatggcattccgagtgttcgaaggggcttcagttggtcctctgattgac

SEQ ID NO: 921 - DNA, 145 bp, Gossypium hirsutum
  Clone ID: LIB3493-054-P1-M1-E3
ccaaagccgattctactttagaagttgggatacaagtaaagtaatagattctttaaagaggaaaaaaaggtggctaaaaaggctaggcttttttttctaatggtccctcctttactttggggttctttttttaaaggcattaaaa

SEQ ID NO: 922 - DNA, 243 bp, Gossypium hirsutum
  Clone ID: LIB3493-054-P1-M1-E4
cccacgcgtccgcaaacatccatgggctgctttgttctatattctattctctccgccgatttcctctatttcgttttcattacctcgaggaagcgccgccgtctgcctctccctcctggtcctaaaccatggcccatcattggcaacttgccacatatgagccctgtgcctcaccaaggtttagccgccatggccaaagtctacggccctctcatgcacctcaggttggggttcgtggatgtt

SEQ ID NO: 923 - DNA, 374 bp, Gossypium hirsutum
  Clone ID: LIB3493-054-P1-M1-E5
cggacgcgtgggcggacgcgtgggttcaccttcttaaggatgttccggggcttatttcgaagaatatagaaaagagcctggtagaagcatttcaaccattggggatatccgattggaactcccttttttggattgctcatcctggtggtccagcaatattagatcaggtagaagccaagttagcactgaagccagagaagctacgagccacaaggcacgttctttcagagtatggtaacatgtcaagtgcttgtgttctatttattttggatgagatgaggaagaaatcaagggaagatgggcttcagaccacaggagaagggttggagtggggagtgctttttgggtttggacctggcctaactgttgagact

SEQ ID NO: 924 - DNA, 383 bp, Gossypium hirsutum
  unsure (1)..(383): unsure at all n locations; Clone ID: LIB3493-054-P1-M1-E6
gagaatgagacctcaggtcacaattcaacaatggaggaaaggagctcaatggttcgagatggaccgtgacctcgccattgaagttgtttcagaccaaatatatttcccagtgttccaaaagtattgcaagggcgcttgctatgctgatgaacattatttgccgactttcgtgaccatgaaatttgcgaacaagaattccaacaggacattaacatgggtagattggtccaaaggagggcctcacccagctaagttcataaggacaaatgtgacagttngaattttggagagattgaggagccaaagccaatgccagtataatggaaataccacagatatctgtcacttgttcgccaggaagttctcgcccgatgctttgtaca

SEQ ID NO: 925 - DNA, 379 bp, Gossypium hirsutum
  Clone ID: LIB3493-054-P1-M1-E7
gtctcctctccataaatctctcactcaacgcagagcgaataggcggagacttccaagaatctatcgcatcagctaatcacgctctaaagaatggatcaggttcaacacccatctatcatgcagaaggtagcaggccagctccttcgttctagccattctcaagattttcaaggttataatgggtctttcaggagtcctgctctataccaaaggcgtgctgcatatggcaattactccaatgctgctctgcagcatcctgtccgggcttttggagacctgtctatggttccatcaacagcttctgctatttgcgttcaggctcctgctgagaaaggatttagcagctttgctattgatttcctcatgggtggagtttctg

SEQ ID NO: 926 - DNA, 187 bp, Gossypium hirsutum
  Clone ID: LIB3493-054-P1-M1-E8
atccctttggggttcatagcctatgactggggtgtggcttctgggtggttttgtaataatataattaatcatctaattaggaatataaagaatgaataattttaaacaatcatgtatgatgtacaaagaaagaagcaaggtttttttatctaaacattttgaatatttttaaggatataatgggtct

SEQ ID NO: 927 - DNA, 297 bp, Gossypium hirsutum
  Clone ID: LIB3493-054-P1-M1-E9
gccttgtgggcctatccggggggggtcctacatacgacctacctccattatcttcccacacaccagaaattcctcttcaattactacagtcaaagagagagagaaactaagagaaaccatgaactcagttattaccggtaatttcagacccgcgtttttcccgagtcaactcagtaaaaactcggcacaattcttgtgcagacccttcaccacactcgtgttcacaagaagttcaaccgctaaagtctgtgccttcgttgaaaccaagtcaacggcaccgattgcggtggagaaaga

SEQ ID NO: 928 - DNA, 372 bp, Gossypium hirsutum
  Clone ID: LIB3493-054-P1-M1-F1
cggacgcgtgggtgccgtattggcaagattaccttgttattgcatcgtatttggcttttaaaaagtgggattttcgttggctttaatgcaggtaatagtgggccggacgcgtacaccgtagttaacaccgcgccatggatcatgactgtagcggctagtactatggaccgaagcttcgtggcgattatcgaacttggaaacggagaaactttctaagggtcgtcgttttatactggtaaggccttaaagggattaccaattgtgtatggcaaaacaacagggaatttaggtgctgaatattgcctctctgggtcacttgatcctaaacttgtgaaagaaaagattgtgatttgcgaacaaggaatagtgcga

SEQ ID NO: 929 - DNA, 371 bp, Gossypium hirsutum
  Clone ID: LIB3493-054-P1-M1-F10
ttcagcaagtgactatgtgaaattgatgaagtcaatttttgacttcgagcttatccgcaagctgcttttatctccgaagtttacattctgctatgatgcacttcatggtgttgctggagcttatgcaaatcgcatctttgtggaagagcttggggcacaacaaagctcacttttgaactgcacacccaaggaggactttggcggaggacatccggatcccaatctgacttatgccaaggagttggttgagcgcatgggattgggaaaatcgaactctggtgttgaaccaccagagtttggtgctgctgctgatggtgatgctgatcgtaacatgatcttgggtaaaaggttctttgtcactccatcatatt

SEQ ID NO: 930 - DNA, 281 bp, Gossypium hirsutum
  Clone ID: LIB3493-054-P1-M1-F11
acgcgactcgtggacctgacgcgtgggcttttgctggttgtaaaatggacgatgactccacttatcgaatcgttcgtcaagcttatagtctctaacaacgttacatttcaaggacgagactgggatttccaaatactgcctttggactatatctaatattatcagcaaagtgtgttatcaacttgacatcaaatttcgtttgaggtatgacagggatcactgataaaggtgtctgatcaaaagattatcagagccaatttcttaaaacaccagaatattat

SEQ ID NO: 931 - DNA, 371 bp, Gossypium hirsutum
  Clone ID: LIB3493-054-P1-M1-F12
cggacgcgtgggctggaatgtgggctagaggatcttattcagctagaagtaagtttgtggacgatgacaacaagtgctacttggagatcaactacaccttcgatatccgtaaagaatggcaatcgtagactacatacgaaggaatcattgtcagcgaattggtttgctttgtgtccattgtttgtcaagtctcctttaggtgtgaccatagttcattcatttactttgttcttattttgccacccatatcctgtgtgagagtgagactaagaatggtctacacaatgaagagagtttagtcgaatagctttctggtttgctccgagtccgagttgcagttagacattcatttctttaggaatggattaatt

SEQ ID NO: 932 - DNA, 144 bp, Gossypium hirsutum
  Clone ID: LIB3493-054-P1-M1-F2
atttggttgagactgtcatctgcatacggattgtgtgtttgctttttccgtgtcaattttagttgaattccttcaaagaatgctaatttgatatttccttgttttcttattgttatgatggtcctaagccttcgattttcagct

SEQ ID NO: 933 - DNA, 242 bp, Gossypium hirsutum
  Clone ID: LIB3493-054-P1-M1-F3
ggacattatactgaaggagctgagattgattgattcagttcttgatgttgttcgtaaagaggctgagaattgtgattgtttacaaggttttcaggtttgccattcactgagaggtggaacagggtcagggatggggacattgttgatatcaaagatcagggaagaataccctgcccggttgatgctaacgttctccgtgctcgcatatcctaaagtatcggattctgatggtgaaccctata

SEQ ID NO: 934 - DNA, 325 bp, Gossypium hirsutum
  Clone ID: LIB3493-054-P1-M1-F4
ggtttttcgaccttaacattcgagtacgcgggattccacgccacttagcaaggcgaattccaccgtcgccaaatgatcgcctacaaccgtacgatcaggggcgtcatgtctgatcgcgatcggtgctcgattcctcttcttgggctttcctctctcctcaatgttgccccctttctcttcctttccataagctttcaccgagaccttcttgggggtcctcgcttctcttcattctggcacatacacgcgcctcaccgtctgcattgataccgcgtcgcagtcacaagctttaaattcgggaaatccaatattgaagacgtacgac

SEQ ID NO: 935 - DNA, 382 bp, Gossypium hirsutum
  unsure (1)..(382): unsure at all n locations; Clone ID: LIB3493-054-P1-M1-F5
cccacgcgtccggcaaatcatggctgctaccacggtcccagccgccgcaaggcagctatctcctaaagaagccgatatccagatgatgttggctgccgaggtccatctcggtaccaagaactgtgatttccaaatggagcgttacgtcttcaagcgtcgcaatgacggaatttacatcttcaaccttagcaagacctgngagaagcttcagcttgctgctcgtgtaattgtcgctatagagaaccctcaagatatcattgtccaatctgcaagaccctatggtcagagggctgtcttgaaatttgctcagtacactggttgtcatgccattgctggaaggcacactcctggtacattcactaaccaactccagacatctttc

SEQ ID NO: 936 - DNA, 381 bp, Gossypium hirsutum
  Clone ID: LIB3493-054-P1-M1-F6
cggacgcgtgggcggacgcgtgggcggacgcgtggggcttcttcttaagtcttcacaagacaaaaggtttgtatgtgaggcagctgagagagctttagaggtcatgactacttctgtcttccctatgtcgttgttgcccaagttgcaaccctatcttaagaacagaaatccacgaattcgagctaaggcatcgatgtgctttagtcgcagtgttccacgactgggtgttgaaggaattcaagaatatggaatcgacaaactgatacaagtagctgcatcacagcttagtgaccagctcccagagtctcgtgaggctgctcgaacccttctattagagctgcaaactgtatatgagaaatccaatggactctcaacaacaat

SEQ ID NO: 937 - DNA, 325 bp, Gossypium hirsutum
  Clone ID: LIB3493-054-P1-M1-F7
ttttgcttgcgcggctgggcgtggtttaagcggagagggtgtgcaggattaaagggtcaccattgtttccaacatgatgcttaataacaagtttttgttcttatcaactttgttttgcattgctgtagctggcgctttaagccaagctcctcctactactagcaatcctccgacatccacgccggtgccgccgaccccacccgctttcacacctccgcctactacccaaccaccttcaacacccacaactactttttcgcctccagctttcactccttttctactttatcaccacctccagtgaccgcttttacaccaccagttt

SEQ ID NO: 938 - DNA, 380 bp, Gossypium hirsutum
  Clone ID: LIB3493-054-P1-M1-F8
ataaaatttgagaatttttcgggttttgtcatcgaaacaagaataaaagggaaacttttcccttattttctcttgttttctcggacttcacttcgtttttcttcttcagttggcgtgaaatttgggtttgttaaaagaaaaacaacttgttttggtaggttttgcgtaactggtttttggatttaacttaaagaattaaacgttgattggtcgtagcgttttccaaaaagaaaaaacaaaaccatttcttcattttttatcaaaaccagagaaagcttgaatattcaacaaaaaattttccaactaccaacaaagactaggttgaatccagatttgtatttatttcaatttttttaatttagtttttctttctctccatt

SEQ ID NO: 939 - DNA, 379 bp, Gossypium hirsutum
  Clone ID: LIB3493-054-P1-M1-F9
caaaatttctagtttattaagccccaagaatatccctaacttgactgcttgtaaccctacatgagcctctgccacaaatggatttgcgatttcggagtggatggtcgttttggatgctaaaatttttccttctgcgtcgtgtactaacaatgtctgaagacttgttggtcaaaggccgcgtcgaaagagattgtgacttctgatcttcttctttcctgtatcgctccttcagtagactgagcaactagccaaaggccgcagcaaaaacaacgaatctgttcagtcattctctaactaaaaacccaggacattgctgaaaaatatgataattgtcttcctcattttgtcggcagcgatggcaaaaagcattttctactac

SEQ ID NO: 940 - DNA, 272 bp, Gossypium hirsutum
  Clone ID: LIB3493-054-P1-M1-G1
gggattatcattcaggtgtgaatgcaaggaagaggaagaataagaatcaaaagctgggatttgagaagacatctggtaagcaggagcaagttgttgcggctttgcctgttgttggggaagcagtgaatgattcgcttccagtggtcgagtctgaaaatgcatttagtcgggggaagtatttgatttatgtgggtggtggagataggtgcaagagcatgaaccattacttgtggagcctttttggtgcattgggtgaaaccctaatttttgaa

SEQ ID NO: 941 - DNA, 292 bp, Gossypium hirsutum
  Clone ID: LIB3493-054-P1-M1-G10
acgagctccattttctgggcgcaggcagttggatcctctctcaccaccttttctaatagctcttcctccaaggtagaagttgtgatagttgatgtttctgctggtcaaaaggaaactgagagttcgggtgatttcaagtttgtgacaagaaaggaacttcttttatgctattctgaatcaggtggtggaaacccaattgcgcttcctgatgatagaggtgaagctgttgttattatgagcaaagcccttcaacattttattaaaaaggcttatgctgatggggtactttgct

SEQ ID NO: 942 - DNA, 381 bp, Gossypium hirsutum
  Clone ID: LIB3493-054-P1-M1-G11
cgacaagctatttagatgtctgggattagggttagggctggaagggaatgagatgaaggaggctatgggtggcgacaacatggtttaccttcttaagatcaactactatccgcagtgccctcaggcggacctggcgctcggcgtgcctgctcacaccgacatgtctgccatcaccattattggtgcctaatgatgtccagggcctccaagcttgtaaagatgaccattggtatgacgttgaatacattcctaatgcactcattgttcacattggagaccaaatcgagattgtgagcaacggaaaatacaagagtgtgcttcatagggccaaagtgaataaagagaagacaagaatttcatggccagtgtttgtggagccac

SEQ ID NO: 943 - DNA, 385 bp, Gossypium hirsutum
  Clone ID: LIB3493-054-P1-M1-G2
aatttgttgggctcattccaacgactgccgaatccaccatttcttttggtgatcgatggtgcactagcagcacctagaagctgtcaaaggccatgctcaaggagaacagtatttcacagatatttgggatttcattggcgttgtttcatgtacacttgcaacaccatgattgatggatgacgcctttggatcccccttccaacttcgatctcaaccaaatgaacaaaggtcaatggccgattcgcaaggttcagttgtacggaggagatgacccagatggcgtggaggccgtgtgtggggatctcacgtgggaagccgaccctctggtgccattccagtgtatttcaggagcttctggagctcttggctgctgaaattctttttt

SEQ ID NO: 944 - DNA, 241 bp, Gossypium hirsutum
  Clone ID: LIB3493-054-P1-M1-G3
ccggacgccgggggttcattgcttgagtgatttccatcccagcaaaagcctgaaacagttttaatcgtcggtgaaatggaaggacaaggggaagatgtttggctgggagcaaataaatacagggagaggcaggctatttgaacagctgctcaaaccccagatacccagggcttcaagggaccacctgctgcacccctggttgagcctgccgagttaacctcatgggccttttacaggggtg

SEQ ID NO: 945 - DNA, 372 bp, Gossypium hirsutum
  Clone ID: LIB3493-054-P1-M1-G4
cggacgcgtgggttcccagagaactttctgatcttcagaaactccgatctcaataccaaccacagctccctccttgcctcgagggaactactgtcagggttgagtttggtgataccactacatctttagacccggctgatgcttataccatagcccgagctttttcttacacttatggcaagcccttggctcactttctcaaggcagctggcaaagtacctgatgcttagattataactgaacattcagctattatgggtggacctgggcttttgtggagacaaatctctggtggtcataaacgtctatggggccttcacaaagttttcaaatttcacaacccttataacactttgcttggctttttggggg

SEQ ID NO: 946 - DNA, 381 bp, Gossypium hirsutum
  Clone ID: LIB3493-054-P1-M1-G5
accaattgtttgagctagctagcgcttactcaaatggcaaccaaaacgatgatgttgcaaatattttcacttttcttctttttgttcagtgtatgcaactccattttccttggtgctaatggagatgacaatggtggttggcaaactgcccatgccaccttctacggtggtgctgatgctaccggcacaatggggggagcttgtgggtatggaaacctgtacagtcaaaggtatggaaccgagcacagcagctttgagcactgcacttttaacaatggcttgagctgcggtgcctgctacgagctccggtgcaacaatgatcctcaatggtgcattagtcgaaccataaccgtgacagccaccaacttttgtccccctaac

SEQ ID NO: 947 - DNA, 326 bp, Gossypium hirsutum
  Clone ID: LIB3493-054-P1-M1-G6
gtggctatgcatggcgacaacattgtttaccttcttaagatcaactactatccgcagtgcggtgaaacattcttatggctttacttttttgataaacttttcttgggggtggttgaacgtgtggcttcttcatgggttgacaaagtcttctatgcttgtaagggttgacctatcgatatgacgtcagagtacattcctaatgcacttattgttcacattggagaccaaatcgagattgtgagcaacggaaaatacaagagtgtgcttcatagggccaaagtgaacttaagagaatactagaatttcatgggcagtgtttgtggagc

SEQ ID NO: 948 - DNA, 373 bp, Gossypium hirsutum
  Clone ID: LIB3493-054-P1-M1-G7
tgagcctcttaaaacttgggttctacaatcaacgcttccatttgcttcgctttattccaccacagtcttccaatgtctccccatctaccttttgggtgcaaaatctgaccaacaataacaccaccaaccactcatcgttatcttattatactcccaggattaatcctgtaatagccaaggcactggctactgaagcatctgccacagtacagcccataaaaatggtgaaagctatcagggttcatcaatttggtggatctcaggtccttaaatgggtagatgtggaacttggggaacccaaagagggtgagatacgtattaaaaatatagctattggagtgaatttcatcgatatctattttcggaaaggagt

SEQ ID NO: 949 - DNA, 331 bp, Gossypium hirsutum
  Clone ID: LIB3493-054-P1-M1-G8
cgctttggaaaggcggatgaaatgggtaataggaagaagaaactattaggtcatccttacggaagctttaaaggtctgaaggaggataggcgtaattctgaagagaaaaacttaagacccggattatcgagaatgattccttctgtgagtttcaatgagaagattttgagatctggtttggctccacaatcccaaagaaggaaatcagcagtttttaggctttcttttaagaggagatcatatgatgcagatgacaaactctaggtctatgcatcaaaacgatttttatatcgtcccaaagctggatatataattcctggtatcaaggatt

SEQ ID NO: 950 - DNA, 274 bp, Gossypium hirsutum
  Clone ID: LIB3493-054-P1-M1-G9
taaatttgtagagcagaggcgaatgagaggaacattgacgttgacttggattctgatggtctgcctctcccaagtagcggtgcagagccaatactactcggagagcttaccatatgatcccaggccggttaaggtcactaatctttacttctttttgcatgaaactctccgcggttagaacccaacagtagtcatggtatgcccaagctaacaacacaagcaacgacaactactcttcagtgccatttgtcaccctatatgccattgatgatcc

SEQ ID NO: 951 - DNA, 324 bp, Gossypium hirsutum
  Clone ID: LIB3493-054-P1-M1-H1
ccaaggacagagtgttagccgacgtcggaggtggggtccactgcttagggatcggacgctcaaacatgcttggaatcgcaagcaatataatccgcaacttccatcaacaaaatctatgggtggaatttgatctggccaataagagagtgggattcgggaaagccgattgtagcaaagcaacactataaagaggccattacgttttgcggtgatggatccccgatcacatgagatgatcgtgaaagaaatatctttatccgacggtctacaatgaaatggaaagtgtcatgtgaagaacaatgggttttggttttaagcatattt

SEQ ID NO: 952 - DNA, 330 bp, Gossypium hirsutum
  Clone ID: LIB3493-054-P1-M1-H10
gcttttcatttcctcagctactccagttcttggttgtcgtatcatgtcataaagcacatcccaaggctaagcctattaaaaagccccatcctgttaaacccccaatccatgtaaaaccaccggttacagtccctccagtcactgtcccaccagtgacagtccctccaatagtaaaaccaccagttacagtcccaccagtgactgttcctcctgtgaagccaccagttgaactccctccgattgcaaaaccacccattacagtcccaccagtgactgttcctcctgtaaagccacctgttgatctccctccaattgctaagccacccatta

SEQ ID NO: 953 - DNA, 313 bp, Gossypium hirsutum
  Clone ID: LIB3493-054-P1-M1-H11
cggacgcgtgggtacgttgtaaagtcaactttaaagcacttgtttttgttccgcacattcgagcacttggagatgcccttgtccatcgcctaaggtatcctcctactgaaagtcaaccacttattaccgatgatctcactgggaccactgatcgaaatgtcaaacaaatgccacagaaatttgtagtggtacaccttcggtttgataaggatatggcggctcattcagcctgtgatttcggtgggggtaaagctgaaaagttggctttggccaagtaccgacaaaagatttggggaggggagggtctcaattc

SEQ ID NO: 954 - DNA, 317 bp, Gossypium hirsutum
  Clone ID: LIB3493-054-P1-M1-H12
gataaagatggtcacggtacacacactgctagcaccgccgctggatctcacgtggcaaacgctagtctcctcggatacgctagcggaacggctcgtgggatggcgactcacgcccgcgtcgccacctacaaggtttgttgggaaacgggttgtttcggatccgacattctggccggtatggaacgggcaatcgaagacggcgtcgacgtcctctcgttgtcactcggtggcggatcggcgccgtatttccgttccaccaattgccattggggcatttacctgctaatgggtaatggcttttctcgatcttctagttt

SEQ ID NO: 955 - DNA, 361 bp, Gossypium hirsutum
  Clone ID: LIB3493-054-P1-M1-H2
cttgggttgagtgtagagatgaggaaaatcatgggtgccaaagttcttttcttctttgctttgctttccttttcagctgtctcggcatttgcacaggatgaggaagaccaaggtcttgttatgaacttctacaaggattcttgtcctcaggctgaagacattatcaaggagcaagttaagctactgtacaagcgacacaaaaacactgctttttcttggctgagaaacattttccatgactgtgctgtccagtcatgtgatgcttcactgctgctggactccacaagaaggagcttgtctgagaaggagacagacaggagctttggcctaaagaatttcaggttcattgagaccatcaaag

SEQ ID NO: 956 - DNA, 270 bp, Gossypium hirsutum
  unsure (1)..(270): unsure at all n locations; Clone ID: LIB3493-054-P1-M1-H3
cggacgcgtgggtgcgcggactgggggagaagatatcggncctcttggtgggccatttggtggggagaatataaagaaaccagagtgggaacaaggggagggaacaacttatgctttcgggttaaaattggatgggccttttcctgaaaaggtaatacctcttgggaaaggagctcttaccttatgctcaagggtttgacaaaagagcccaataagcaaagtaaaaacactactggctggggccttggacgtatatttgaaatacttttt

SEQ ID NO: 957 - DNA, 377 bp, Gossypium hirsutum
  Clone ID: LIB3493-054-P1-M1-H4
cgattggagtgtcgatggacaatgctcgtttggctattgcagctattgggaaattaatgtttgcccaattctctgaacttgttaatgatttctacaacaatggtctcccatcaaacctctctggtggtaggaacccaagtctggattatggtctcaaaggcgctgaaatagcaatggctttcttattgttctgagctccaataccttgctaatccggtcactagccacgttcaaagtgctgagcagcacaaccaagatgttaactccttgggactaatctcttcaaggaaaactgctgaggctgttgatattttaaagcttatgtcctttacatacttggtggcactttctcaagttattgatttgtggcatttgga

SEQ ID NO: 958 - DNA, 233 bp, Gossypium hirsutum
  Clone ID: LIB3493-054-P1-M1-H5
cgaacgcatgggttatgaacatggcggggacgaatcatacagctcttgagtaaactggggggaaggctccatggaagcaacttgataccaaggctaaccgtaaatctttctcaaccactagctgtgtgaagaaaccctatcgctactcacctgtgatcgaaatgtcttaactgaaattcgaaagtactagaagagtactgcgcttcttatcaagaaatggcctttccaaaagc

SEQ ID NO: 959 - DNA, 283 bp, Gossypium hirsutum
  Clone ID: LIB3493-054-P1-M1-H7
ctcctatgactcctaaagctgcagaaattatggaaaaactaaaggataaaaaggtggagtatgaagcggttgcttccagtgagagttctgttcatcttgaagacattgataaccagattattgctgaagttttgggtcctgaaaggtatggtcgggttagatttcaaggatcttttattaacccaacccaatattttggatccagctcgcggtaatacatgccttcggcgagtcagtcttaagctgaagtttataggttaaaagaccatatgacttagatgca

SEQ ID NO: 960 - DNA, 331 bp, Gossypium hirsutum
  Clone ID: LIB3493-054-P1-M1-H8
gcagaagtgctcttgtacaggagactaaagggatttgggttgatctacttataacggtgctttgtgatcagtggaaaaaatgcaaaagagctattgaggcttcatcccctcgaaaggagcccaagtgcattcttttgccatttcagaaattgaattctgaagatattcctgctgagtcatccttcactgctggtgagaggatgagtgaattggtaaaggtatttgtgctgcttcatcaacttcaaattttctccctcggtaggactttgcctgaacagccttctattcagccacaaattgatattccagaaatatcccgtgccaaggcagc

SEQ ID NO: 961 - DNA, 117 bp, Gossypium hirsutum
  Clone ID: LIB3493-054-P1-M1-H9
ttttaacctctctgtagagctggggggttcatgctagaaagtggtttagtctttagagaaactagaattgcaagatatattgtttggaggtgtatgttgttctttagcttataaagg

SEQ ID NO: 962 - DNA, 101 bp, Gossypium hirsutum
  Clone ID: LIB3493-055-P1-M1-A1
gcatagataatcactttgattggcacggatggagacgtataataatattactgatttcattattccaccaaatcccttggtgcttttctttatattctctt

SEQ ID NO: 963 - DNA, 136 bp, Gossypium hirsutum
  Clone ID: LIB3493-055-P1-M1-A10
ctcaagttcatcgtggaagataggtcggataatcggacgtataaagtgggtcttaacaggtttgcggatatgaccaattaggaatacaaagccatttatttggggggggggggtgttccccatttccttcaacttt

SEQ ID NO: 964 - DNA, 96 bp, Gossypium hirsutum
  unsure (1)..(96): unsure at all n locations; Clone ID: LIB3493-055-P1-M1-A2
tcctcctctgggtgccaaagtcacctggagcgagggtagcataactatgcacccacccccaanaaattcctcacggaggaaacacttagttggtat

SEQ ID NO: 965 - DNA, 75 bp, Gossypium hirsutum
  Clone ID: LIB3493-055-P1-M1-A3
ggtgattggttattccgttaatgtgtgaattgaggttatggtttatttcaaaacccacaccccctctttcacccc

SEQ ID NO: 966 - DNA, 94 bp, Gossypium hirsutum
  unsure (1)..(94): unsure at all n locations; Clone ID: LIB3493-055-P1-M1-A4
gaagaacaagtcattgaagggcgtgatagagctgtgttgaatatgaaaaaaggcgaagtancactgttgactattgcacctgagtatgcatttg

SEQ ID NO: 967 - DNA, 201 bp, Gossypium hirsutum
  Clone ID: LIB3493-055-P1-M1-A5
ccaaatccctcatctgcttctcgcgggttctcgggaacctcaagcactgtcttcttccgatggtgccactactgcgagacctggtgagcgatctacgccgtacgcatctaacggtatgcgttttctagaaagcgtcgggatttccaatcccatcccggaccattacaggtcagaagacttttattctgatttcttatgtaa

SEQ ID NO: 968 - DNA, 166 bp, Gossypium hirsutum
  Clone ID: LIB3493-055-P1-M1-A6
ccgttttgttcctttggatctgggaggcagccgacggttcctttgaccaccaccaccgccacctctctgtgatcaaccttcactctctttttcaaggaaattaactgaaatggctggaggattaatccaccaggttttaaggaggaaatttcaatcacagtctgct

SEQ ID NO: 969 - DNA, 235 bp, Gossypium hirsutum
  unsure (1)..(235): unsure at all n locations; Clone ID: LIB3493-055-P1-M1-A7
gcgagtcaactggctgggaaaggccgtaaggcgcaaggaagctgattggcgggatccctcgcgggtgcactcggcgaccgatcttgatcttntgagaagggttcgagtgagagcatgcctgtggggaccccaaagatcggcacctatcgcctgggcggcgcgaagccagacgaaactctggtggagggccgcatcgatactggcgtgcgaatcgttcgtttgatttgggtatagg

SEQ ID NO: 970 - DNA, 112 bp, Gossypium hirsutum
  unsure (1)..(112): unsure at all n locations; Clone ID: LIB3493-055-P1-M1-A8
ccctgccgaaaatcccggtcaccgtcttgggatatatgaaatggaccgaaccaactatttacattttttaggggaaacacttnctttctattaatttcaacatgaacaaaat

SEQ ID NO: 971 - DNA, 179 bp, Gossypium hirsutum
  Clone ID: LIB3493-055-P1-M1-A9
gaaattaagaaggtttgtgacggtcaagaagagcttgacattgatgtcttggttcatggagagcctgtaagaaacgatatgggtgagtactttggtgtgctcgtgggtggttaagtattgcctcgtttgcggggtgtacccctactcagggtttttctgttttttttttaaattgttgt

SEQ ID NO: 972 - DNA, 327 bp, Gossypium hirsutum
  Clone ID: LIB3493-055-P1-M1-B1
aaaagaaagaaagtggcaaccggtccaattatatactctcaacgaatcttctcagttctccccactccataattttcttttgattctcactttcttttctctatttgtgtctagttttcctcctgttactttggatacgcttaccatttcttttcctttcctttattatcatcaatagtaccatgtgtgttgaagatatagaacaggtcagccaagaaatggaggaccttggtgatggcagtaccaacaaaaagccttggcctttactttctaggggtgatttcttgagtacccagatggagaattgggttcacaaagactctccct

SEQ ID NO: 973 - DNA, 215 bp, Gossypium hirsutum
  Clone ID: LIB3493-055-P1-M1-B10
aaactttttagttctcagctctgtcaaattcaccatggctgacaagtgtggcaactgcgattgcgctgacaagagccagtgtgtgaagaaaggaaacagcttggtcattgagactgaggagagctacatcagcaccgtagtggtcgagcctctggcagagaacgatggccagtgccagtgcggaactagctgcagctgcacaaactgcacatgtg

SEQ ID NO: 974 - DNA, 229 bp, Gossypium hirsutum
  Clone ID: LIB3493-055-P1-M1-B11
ggaactgcaacgaactcagagggatcttcttggtgaagacttgggtccattgaactcaaaggagcttgagcagcttgagcatcaactagagtcatccttgaaacatgtgcgctccaccaagacccaatatatgcttgaccagcttactgaacttcagaataaggaacaaatgctaatggaaactaacagggctttgtcaataaagcttgaagaaattagtgccagaaac

SEQ ID NO: 975 - DNA, 94 bp, Gossypium hirsutum
  Clone ID: LIB3493-055-P1-M1-B12
cgcccaaaaaaattggtggggagggtctcgaaagaaaccgccaaggaatggaagggtttacgtgtcaccggcaaactgactgtccagaaccgtc

SEQ ID NO: 976 - DNA, 234 bp, Gossypium hirsutum
  Clone ID: LIB3493-055-P1-M1-B2
cgtaaaacttaaggagaatgaagtgtggtgtgacaacccaaatagcagaagaatctgatatatctgcagtcattcagaatgtcaaacaacgtgttaagggtgctaaattacctgatattgagggtggactaattctttgggatgtgataatggatgctgttcaatggtttggaaacacataggagcagaatgcccacccccccttatacaggtgaaaacatggggaaagctgtg

SEQ ID NO: 977 - DNA, 332 bp, Gossypium hirsutum
  Clone ID: LIB3493-055-P1-M1-B3
gtttctcagtatgcaaaagttgtgaaggcggttaggcagaagggtgacttgttttcagaatctcagcgcatccagtacaccatccaaatacgagctcaggacgttccagatgctcgaacatatttattgaccctgaaggatataaggatcaagagaggactcactgatgaccttggtgctgaggctatgatgatgaatgctttggataaagtccaaaaagaaatcaagaagcctcttatgaggaatgacaagcaatcaatggctcttcttacagcagaggttgacaagatccataaaaaggcttggcattccgccccacccccccccccccc

SEQ ID NO: 978 - DNA, 196 bp, Gossypium hirsutum
  Clone ID: LIB3493-055-P1-M1-B4
tttaccattcatagcatagcaggtgagtgcaacttcacacccaccaccattggctgtttgtgatcatccgaaaaagaatggtgaccgtggaagaagttcttaaggctcaacgtgcccaaggccctgccaccgtgttggccatcggcacatcaaccccgcctaattgtgttgatcagagcacataccctgactacta

SEQ ID NO: 979 - DNA, 290 bp, Gossypium hirsutum
  Clone ID: LIB3493-055-P1-M1-B6
cagcacttgggtgaaaacatgggtaggaccattgctatggatggaacggagggactcgtcagagggcagccggttctcaacaccggatctcctatcactgtgcctgtcggtagagctactcttggtcgtatcataaatgtcattggagagcctattgacgagaaaggcgaactcaaaaccgaccacttcttgcccattcacagagaagcaccagcctttgtcgaacaagctactgaacaacagatccttgtcactggtataaagggtgttgatctccttgcaccatatca

SEQ ID NO: 980 - DNA, 211 bp, Gossypium hirsutum
  unsure (1)..(211): unsure at all n locations; Clone ID: LIB3493-055-P1-M1-B7
gcggcttatcanctacggtccgtaccgaaaaaagtcgacgactatccctctaaaaagggttttcttttggcagcctatgctggatcaaccgtgaacagccaaatcctaaacgaagtttcgcaatgcgtcgagagcatcaatggcgtcaaagaaggtcgttggaaagccactctcactttttataaacccatgttactagatccagcgttat

SEQ ID NO: 981 - DNA, 73 bp, Gossypium hirsutum
  Clone ID: LIB3493-055-P1-M1-B8
tgatgatgaaaatgatggagggtgatcagcttattaggaggagaagaaagtcctatctcgaaggcgatgattt

SEQ ID NO: 982 - DNA, 326 bp, Gossypium hirsutum
  Clone ID: LIB3493-055-P1-M1-B9
gctgagattactgacgagcttggccttcattctctccgccaacgccactggtacatccagagcacatgtgccacttctggtgaaggtctgtatgagggactggactggctttcgaacaacattgcaaacaaggcatagatggcatcattgagttgttagtctcaccaatgctggccccttttagagttccggatgttcatcccgttcaagtgtttttggtttttcgggttcatttgtttcttgcgaacattgccatttggtacctgtagtttaacaataattaaaaaattgtgtggtttccttcgggggattatcccgcgtagctg

SEQ ID NO: 983 - DNA, 305 bp, Gossypium hirsutum
  Clone ID: LIB3493-055-P1-M1-C1
tcggactcgtgggggaagttggtggtgggaaaaaggagtttgaacaacaaatggaagtcttcaatagggtcggtcgacacccaaatgtggtaccgcttcgtgcttattcctattggccggcacagaagctgttggtatacaattacatgccggacggtagcttggtcgcactcttgcatgggaataggacttcggaaagaactccattggattgggatactagaatgaagattgctctcggaactgctagagggattgcgaacaattatactgaaggtggcggcaaatttacccatgggaacatt

SEQ ID NO: 984 - DNA, 288 bp, Gossypium hirsutum
  Clone ID: LIB3493-055-P1-M1-C10
gcaactggttctttcaggcgcagggtctacggatccaagctctagacctgcttccatcgatcctaattatagagcggatccaagctccagatctgcttccattgatcccagacccgcttccattgatcccaactatagagcggatccgggctctagagctgctcccattgatcccaattatagagtggatccgagctctagagttgcttccattgatcccaattatagagcggatccaagcgctagaggtgcttccattgagcccaattatagagcggatccgagtgc

SEQ ID NO: 985 - DNA, 183 bp, Gossypium hirsutum
  Clone ID: LIB3493-055-P1-M1-C11
gctattcacacaatagagtcggggtttttagatgggcttgataggccttgattatttgacacttccttctcatggccgccgctggtgtcgagttcccgtgcttcggccgagggctcacataggccaccgaccaccgggcccttgaagaatccttaagtgtctaaggtgaactcttcttttctt

SEQ ID NO: 986 - DNA, 183 bp, Gossypium hirsutum
  Clone ID: LIB3493-055-P1-M1-C12
tagaggtctggtctactgaacaggctctcctccctgttagcaaccaaagactcagatccgctcggatttctttgtcccagaactagaatggagacctttctattgacatcagagtccggaaaccagggacaccctgacaagctttgcgaccagggctctgatgctggtctcgatgcctgcctt

SEQ ID NO: 987 - DNA, 237 bp, Gossypium hirsutum
  unsure (1)..(237): unsure at all n locations; Clone ID: LIB3493-055-P1-M1-C2
tctactgcgtgtncaaagggggtcgtcattagccaccaggaggaccctaaccttggctctcaagtccaccagggtggctcagtctcgagccttgcagacattctcggtccgcgagcttccggacgactatggcgcactcgagcccgccatcagtggagagatcatgcagctccatcaccagaagcatcaccaaacttacatcactaactataacaaggctttggagcagctccatga

SEQ ID NO: 988 - DNA, 331 bp, Gossypium hirsutum
  Clone ID: LIB3493-055-P1-M1-C3
ggtaattgaagaatctgttgtggtgggggatatcataaacctctccaatggagattgaccctaaacctgattctgaaaatgccgccctcgttctcgttaagcaaggagctgaagctagagttttcgagtccgtattcgctggaaaaaggtccatcgtcaaagaacgcttctccaagaaatacaggcaccctactcttgattctaaactcactctcaagcgtttaaacgcggaagctaggtgcatgaccaaggctcgacggcttggcgttttaactccgggtctttacgccgtcgaccctgggatccataccctgactttcgagtacgtcga

SEQ ID NO: 989 - DNA, 255 bp, Gossypium hirsutum
  Clone ID: LIB3493-055-P1-M1-C4
cagctatctacggtgccacctggacggaggaccccagaagccattgccagagctgttgaatacttggataatcttgaccaggcagctttacaaggtggattcatcttggaaaaaattatgggtccgatctcaacaggccatttggagctccaaacccgtaacccagacgataacccatccgtcaccttcaattatttccagcatccactagacttgcaaagatgtgttcaagggattcaaaccatagggaaaatc

SEQ ID NO: 990 - DNA, 275 bp, Gossypium hirsutum
  Clone ID: LIB3493-055-P1-M1-C5
gtttgttctgccctccccttcggtatcattactttaattattttctccctctgcccggatctccgacgatattatcccattttattcctccctctcctcttttatcccccaaaattctaaaagaagttctcccacatttcatatttaattctaaaatattttctatcttcttgtttctctattgttttcttttgattgaataaagaggagagggaaacataacaagaaaaaaaaatgaactataagagttagggttcgagccaaggttttgtgga

SEQ ID NO: 991 - DNA, 271 bp, Gossypium hirsutum
  Clone ID: LIB3493-055-P1-M1-C6
cttcccagtcaacaacaaaggcggccgcggaaggtggcaagaaagctgccaaaaccgccatcaaagagacccttttgacaccaaggttttacacaaccgactttgatgaaatggaggcgcttttcaacactgagattaacaagaaccttaaccagtccgaatttgaggcactgctgcaagagttcaagactgattacaatcagactcactttgtaaggaacaaggagttcaaagaagctgctgataagattgatggtcctttgagacaaat

SEQ ID NO: 992 - DNA, 339 bp, Gossypium hirsutum
  Clone ID: LIB3493-055-P1-M1-C7
gtgcctggtttcaaccgcatagaggccatcaatgcatgggatgaagatgatggcaacgccatagtcttgctggcacccaacattctatcagtagagcacaccctggagagaatggacctggtccatgctttagtggagaaggttagaatcgacttaagaacagggctagtaacaaggcaccccatttcagcaagaaatctggatttcgcagtattaaatccagcttatgttgcaaagaagaacaaatatgtgtacgctgcgggtggggacccaatgccaaaaatagcaggagtggtgaaactggatgtgtctaaaggagagccggatgagtgtaataga

SEQ ID NO: 993 - DNA, 201 bp, Gossypium hirsutum
  Clone ID: LIB3493-055-P1-M1-C8
ggcaactatgagaatgagaaaggagttcatggcagcttgggatggattaaggtcaaaagatagccaaagaatcctcatccttggtgccacaaataggccctttgatcttgatgatgctgttattcttcgcttaccaagaaggatatatgttgacttaccagatgctggaaaccgcatgaagatactgaaaaaatttcttgc

SEQ ID NO: 994 - DNA, 314 bp, Gossypium hirsutum
  Clone ID: LIB3493-055-P1-M1-C9
aaaatttcgatcatttgaccgggtaaatacagaaaattcttattaaaaaaaattcagttttctttctccctttccattggtcaatttgcccggaaatcaaaatgagaaacgactaaggtggaaccatggttatggagcagcaaaccggtctccatagccgaccaaatatggggactctgttccaacaatcagaacctccgtcgttttctgacgacgatgacttccataatcggaaaagcaatgcttcattgtctagtccgaggtattccaccacaacaagcggcgacggtgaagtctctccttatatgatgtca

SEQ ID NO: 995 - DNA, 275 bp, Gossypium hirsutum
  Clone ID: LIB3493-055-P1-M1-D1
gcaacatcctccctagctccttgcggggggtccgcccaatggccattgctccatcctcctccaggctctttaacaccaatgccatgcgtgagttcgacgactatggtgacgagcatgacctcagtgatgaacgccagcgttcactttctcgccgcggtgacggttttttcacagatgtgctcgatccttttgctccaacaaggagcctgagccaagtcctgaacatgatggatcagttcatggagagcccatttctctccgcttccccgggcatg

SEQ ID NO: 996 - DNA, 229 bp, Gossypium hirsutum
  Clone ID: LIB3493-055-P1-M1-D10
atcttgacaaagttaagggaaggactattacctgaggaccgctatctattacatatacatcaacaccgacagaacaactcacagacacagatgaactcattaaacaaagcctgatcttgtaaactatatacaaacacagcctagcttatttctgagcgactcaggccctgctagtgacaggaccactgactgaataaccatgtagaacttttatattacttgccgaacc

SEQ ID NO: 997 - DNA, 367 bp, Gossypium hirsutum
  Clone ID: LIB3493-055-P1-M1-D11
gttggaaagctacttttgtcaggggttatgggctaccattacaagacttccttttcgagacatctgatgacaggcgttatctcaactttacttttggatgcccccttcttgagacagtggttgacaagttaaccgtcaaagttgtgttacctgagggttcaaaagacccttctgctgtggttccctttcctgtggagcagcatctggagaccaaatattcttaccttgatgttgggggaaggactggggtggtcatggaaaaaaaaaatcttgttcctgcgcacaactcttatttccagggttactacacctctcagccaatcttcatgcttgccgagcccttgatgttggcgtccgcgttcttctt

SEQ ID NO: 998 - DNA, 300 bp, Gossypium hirsutum
  Clone ID: LIB3493-055-P1-M1-D2
gtaggttggctctcctgtcctgttagggtgctgtgtggatccaaccaggtgtttccaagagctaggctttgatacttaaaataagaaccactatgggtatttctaggtataggttctttctggttttatttggtggcataatcccaaacctagaagctcatatcgctgagtatgacgagtactggactgcacgagaattggaagccattgagaacctggacaagggctatcactccaacccggaggagggggggccgcattacaatgaccacttctctaggaccatgctcgaggtttata

SEQ ID NO: 999 - DNA, 208 bp, Gossypium hirsutum
  unsure (1)..(208): unsure at all n locations; Clone ID: LIB3493-055-P1-M1-D4
cccacgcgttcgggcaaatccancgacaggttcaaactactggaaagcaagcacttcangatgcactgagatctatcctggaaacttctgttattccagcatttgagatggcatgcgaatcaatgtgttgagcaaattgatgtcacatttcataaagggcttatagaacacacaggaactggtcataaggaatttgaaaattcacatt

SEQ ID NO: 1000 - DNA, 203 bp, Gossypium hirsutum
  Clone ID: LIB3493-055-P1-M1-D6
aaacatgagagatggcctctgggatgggatctgcaatcttaattactctcggtatttctatctcgacgcttcattcccggtggcatgtaactgcgaaaacagtccaatgatggccccaaaaacatggacgctattgctaccattggggcactcgacactaccgaggtggatggacccagagttagcattcacgaagaacaggc

SEQ ID NO: 1001 - DNA, 150 bp, Gossypium hirsutum
  unsure (1)..(150): unsure at all n locations; Clone ID: LIB3493-055-P1-M1-D7
aaaaaagagagatggcgtcttgataaaatctggagtctgaattctgtcngtgtttttatctgtacgcttcagttcgggtggtagggtgctccaggaacagcccaatggtgagcccaaaaacatggacgctattcctaccattgatgcact

SEQ ID NO: 1002 - DNA, 269 bp, Gossypium hirsutum
  unsure (1)..(269): unsure at all n locations; Clone ID: LIB3493-055-P1-M1-D8
gatccttcatattcaaggtggcgcaatgcggcaaccaaatcggagccaanttctgggaagttgtttgtgctgagcatggcatagatgcaactgggcgttaccaaggagacttggatcttcaacttgagcgaatcaatgtctactacaatgaagccagttgtggtagattcgttcctcgtgctgttctcatggatcttgaacctggaaccattgacaggatcagatttggccctctcggtcagatttttagaccagataacttcgttttt

SEQ ID NO: 1003 - DNA, 80 bp, Gossypium hirsutum
  unsure (1)..(80): unsure at all n locations; Clone ID: LIB3493-055-P1-M1-D9
cacgaagcaaaaaagtggagatgtnatttgaggaagtgaaatatatttatttatgtgggttttttggttgngattttaag

SEQ ID NO: 1004 - DNA, 343 bp, Gossypium hirsutum
  Clone ID: LIB3493-055-P1-M1-E1
ttttcaaaccctagcctgtatgggggagccctttccaatggcttcgcgtccactcctctcttctctcctccgctccacttctcgccgatctctctccaaatctcccagccctacccctcgcctcccttccccttcccccacgcgccgcccttttccttgcccttactttctctcacgcgatgctgagtactctacatctgcggctgctgccgcttctgctccatcgcagcctcctcccgctaagaagggcggaaaaggtgagatcactgatgagttcactggtgctggagccatcggtcaggtttgtcaagtgatcggtgcccgcgtcgatgttagattcgat

SEQ ID NO: 1005 - DNA, 345 bp, Gossypium hirsutum
  Clone ID: LIB3493-055-P1-M1-E10
tgatcattggatcttcggggttggaccatttattggtgcagccattgctgcaatctatcaccagtttatcctgagggcagctgctgttaaagctcttggatccttcaggagcagctctgccatgtaattaagcaaatcattctccagccacaagtttaaacaaaaaaaaaaaaaaaccggggaggggggtgggttgccatggaggattggattaaagtttatcaatgtgggcaagaggctttttcagaccactcaattttgtaattattttggaagattgtccgcttttatgtatgtggtccttatttttaaggagtctcatcaatatccctgctttttttttct

SEQ ID NO: 1006 - DNA, 100 bp, Gossypium hirsutum
  unsure (1)..(100): unsure at all n locations; Clone ID: LIB3493-055-P1-M1-E11
cttttagattttncttcgggcgggctaaatacccgtggcgagccaaaatgggtatttctcgtgattccatgcacaagaggcttgccactggtggcaaaaa

SEQ ID NO: 1007 - DNA, 204 bp, Gossypium hirsutum
  Clone ID: LIB3493-055-P1-M1-E12
cggatatttctcccctggtctgtactggggtattagaggctgtagttgctgctcttttcatgaatatttatatcgttggtctaaatcagttgtcagacgttgagattgacaaggttaacaagccttatcttccattggcatcgggagagtattcaacacttaccggcatcatgattgtcacatcattttccatcatgagctttt

SEQ ID NO: 1008 - DNA, 401 bp, Gossypium hirsutum
  unsure (1)..(401): unsure at all n locations; Clone ID: LIB3493-055-P1-M1-E2
ttttaaacaaagatccccgatggcctggttagagttagtttctcgtatttatngggctacttgaccagttgtgggacgacaccgttgcgggtcctcgacccgataatggtctcggcaagctccgaaagcactccactttcactttccgctctaactcctccaaggaatctgatggcgggagtgtgagatcgtacaatgatgagacgcctgaggaaacaacgaaagtgacacgtacgattatgatcgtaaaatcgccgggttaccagagcggatcgcctccggttttcccggccgaatcgactcctccgggatcttctttttctggtgatatatacacaaataatttcctcactgattggcgaatttgtccctgggttagttcttgaaccccaaaactattc

SEQ ID NO: 1009 - DNA, 200 bp, Gossypium hirsutum
  Clone ID: LIB3493-055-P1-M1-E4
aacgaagggcaaataggtctagtatagctttcctcatgatctgaaaaaaactcgcatggcattcatctaaatgcacctcctaaaccactggatctcctctgagcttatgggtcggttaagcctttttggccaaacttattttcatttccttgttggccgtaaaaatacttattccctcgaccccctttttggaaccaaat

SEQ ID NO: 1010 - DNA, 374 bp, Gossypium hirsutum
  Clone ID: LIB3493-055-P1-M1-E5
atttaatcaaagttcgaatgcgggttgaaggtgaagcccagggccctaacgcggctgctcaaaatctccgcccttctttagcttttcagaccaacagcaccccctcctctactgtacacctcagacaagccacggcggcgcgtattggacctgtggctactgggattcggatctttaaaaccgaaggcttcagagctcttttctcaggtgtttccgctaccgtactccgccagaccctttattccaccacccggatgggaatctatgacatcctgaagcataaatggaccgataaggaaacgaataccatgcctctcgccagcaaaatcctcgctgggttaatagcccggggtatcggcgctgccgtcgggaac

SEQ ID NO: 1011 - DNA, 318 bp, Gossypium hirsutum
  Clone ID: LIB3493-055-P1-M1-E6
attaactgatataccaatacggggatgggactgagcaaagattaactaacgacatgagaacatgagacaaagcctgctcaataatagcacacgtcaagactattctactatgaatgttcaaaagaaaatctatgctattcgatgtatcttttgatgtatatggcatgaaacaagtggtaatatgatactctttggtgactgaaacaggaacctaactggattagctgctgattcaatacctcaaatactgttaaaatacataagtttgtttattggagcttattatcactactacgaaggagaaaactttctagaaaa

SEQ ID NO: 1012 - DNA, 341 bp, Gossypium hirsutum
  unsure (1)..(341): unsure at all n locations; Clone ID: LIB3493-055-P1-M1-E7
attaacttttanaccgagaaggagattcactgagcagagattaactaacgacatgaaaacatgagaaaaagcctgctcaataatagcacaagtcaagactattctactattaatcttcaaaagaaaatttatgctattcgatgtttcttttgatgtctagggcatgaaacaagtggtaatttgatactttttggtgactcaaaagggaacctaactggattagctgctgattcaatacctcaaatcctgttaaaatacataactttttttcttggagcttattttcactacttcaaaggagaaaactttctaaaaaaggagttggatggtgcaagggattt

SEQ ID NO: 1013 - DNA, 279 bp, Gossypium hirsutum
  Clone ID: LIB3493-055-P1-M1-E8
cgccatccctcgtaacggacagggactgttcccagactttatccgacgaatttcttttgtcatttcgttgataatccgaacttcaattctttaaaaaggctttggattcttggataaggcctctttgataaacaaagtttcatgtctgatctcgacgtccaggttcctactgcctttgatccctttgctgatgcaaatgctgaggactcgggtgctggtgcaaaggagtatgttcatatccgtgttcaacaaaggaacggtaggaaaagcctgacgact

SEQ ID NO: 1014 - DNA, 296 bp, Gossypium hirsutum
  unsure (1)..(296): unsure at all n locations; Clone ID: LIB3493-055-P1-M1-E9
aaatcggttgccaagagcccaggggctcttaatgctccagataaccctcangctgtatctgctctcaaagatggcttcttacctaatcactttgcctctgtttatcccgggtctgtctccatcagtctcggctcttctggggttatggcttattctcttgaaaaacagaacccacttctccccagactgtttgcggttgtggatgacatattctgcttgtttcaaggccacattgagaatattgccgttcttaagcaacaatatggcttgaacaaaacagcaaatgaggggatcat

SEQ ID NO: 1015 - DNA, 341 bp, Gossypium hirsutum
  Clone ID: LIB3493-055-P1-M1-F1
cttttaaaaaacataaaagatggtgaaggttccttttgttgtgttctcattggctttggtgctctcaatccaattcgtagtgggacaagatgaggaggctatagatgaggaagtatcccgggaagccgatgatatacttttgagttcaggggcaactaatctcgttgaaaaccttaaaagctctgctggagataattcccagagtgtggatgggccaacttctggcttagctgatgagattgcagcttcttcagaatcggaagtagaagttgctattgaatctgcccgtgggatgaagcgtaaaatggcataataatcccaatgatgtttagaaagaaaca

SEQ ID NO: 1016 - DNA, 411 bp, Gossypium hirsutum
  Clone ID: LIB3493-055-P1-M1-F10
gttgaagaggttgttacaacgggtgaaatagatgatgaaacctatgaagagattgttcgggtaggttatcttattacttgtccctttcaatatgattgttatttgttctgatagctaatgtttgaaccagaggtaataggcaagtttagtagtaagttttggctgtaatagtcacaagtaatttactccctttatttgccatgaagaacacatgcatttttttttattaggtgttagcattttcagagttgttttaacttatcatttgaagttagaagaatgactgcttattcacgactcaaaccacaatcatactggcttgttataattggtttttagctatgatttcttactaatacaaccttaaaggtgtttgtttagtgaccaacaaaatgagctcattttatcttg

SEQ ID NO: 1017 - DNA, 303 bp, Gossypium hirsutum
  Clone ID: LIB3493-055-P1-M1-F11
ggtgtgcctatccattgcatcggtgtcggacctggtcgtgatgctctcatatacaaataattaatcacttttttttttttttggtgctcatgctattgctagttgattttctttttctctgcacgcaggcagtacgatactgtttgtgctacaaaaaatatttataacgatggggaaatttcccataacataaattaggggaaattgcataattcaacatccaaatgttctcttttagccaagtgaggcaattagatttttagacttttaaatatgttgattgaaatgaatttccctatttgg

SEQ ID NO: 1018 - DNA, 283 bp, Gossypium hirsutum
  Clone ID: LIB3493-055-P1-M1-F12
tgttttatgctgtttaggttggctcatttggtatggcctatgtgcagctttgcttattctcatagaaatttgtttggaagaaaccaaaagcttaatatttccttagaaaggggccaaatcgactctatattccgcattaactatacagacccatggattgaaggagatgataagaggacatctagaacaataattatttttgcttctactttttaaataatttggaagggtgactttccaccttggagctcttctcttcttttctcttttaaaaggaatttca

SEQ ID NO: 1019 - DNA, 326 bp, Gossypium hirsutum
  Clone ID: LIB3493-055-P1-M1-F2
ccttgtctatctgcctccgagtgaatggctttgccgaaccagcaaactgttgattatccgagcttcaagctcgttatcgtcggtgatggaggaactggaaaaactaccttcgtgaagaggcatctaactggggagtttgaaaagaaatacgagccaaccattggtgtggagggtcatcccttggacttcttcactaactgtggcaaaatccgtttctactgctgggatactgctggacaggagaagtttggtggtctcagagatggttactacatccatgggcaatgcgccataattatgtttgatgttactggccgggtgacata

SEQ ID NO: 1020 - DNA, 372 bp, Gossypium hirsutum
  Clone ID: LIB3493-055-P1-M1-F4
cccacgcgtccgaaaaaagagagatggggtctgtaataaaatctgcaatcttaattctgtcggtgtttttatctgtacgcttcagttcgggtgttaggttgctccaggaacagcccaatgatgaccccaaaaacatggacgctattcctcccattgatgcactcaaccctaccgagttgaatggacccggtgttggcattcacgaagatcatgttgtcccaaaaggtgctgaaattggtactcttggttttggttttgaaggtggtcctgataaatggtggtcttttgggtgttccggtaattggaatcctggggggtttcgttctaccctttccctcaaatttcaaaaaatcccaagaaatttcaggaaat

SEQ ID NO: 1021 - DNA, 423 bp, Gossypium hirsutum
  Clone ID: LIB3493-055-P1-M1-F5
ctcaaatcttacatttctctgggtttggttttctttcaatattcaaaaacgtttcaaagcgagtagttggttttttttttttttcttttaagaatttgtgtggaaaaaaaaagaaaaaaaaatggctgagcacgaagagaagaagcacgaggaatctttgatggaaaagatagcggagaagatccatggtcatgattcatcgtcatcgtcgtcggattccgatgacgacaagcaatcggaatcttcgatcaaggacaaggtgtttcgtctctttggaagagaaaagcccgtccaccatgttttcggtggaggcaaaccggccgacattttactgtggaggaacaaaaagatctcagcaggagcgcttggtgttgcaactgtgatatgggttttgtttgaattgcttgaatatcacctgctcac

SEQ ID NO: 1022 - DNA, 298 bp, Gossypium hirsutum
  Clone ID: LIB3493-055-P1-M1-F6
ggagctttgggtttgacacacgggcggtgctaattggtcttattatatttcagcatactgtaataccactccaacaccttgtaagctttggtctcaatcttgtaagcagatcatttgaatttcaggctgatgcctttgctaagaagcttgggtatggatctgctttacgtgctggtctagtgaagctacaggaagaaaatctgtctgctatgaatacagatccgtggtactcagcttatcactattctcatcctcctctttgtgaaagattggctgcaattgatgcagctgacaaaaa

SEQ ID NO: 1023 - DNA, 281 bp, Gossypium hirsutum
  Clone ID: LIB3493-055-P1-M1-F7
gagatgggtttgggtggacgggggatgggttgccgttggtccaccggagtgtcgtctgagaacccttgggtcgatctcaatggaactcatctctccttgcttgtcttggccgtaacgatgaattttgcagcagcgacattgaagtctgtctccttggaagcttggtcccttgtgtgctatatggaaccaatgtcgaaagacttggatctgatcccgggacatttgcaaatcactgcttgccatactcaaatctttacctaatcggtaattcattttttggc

SEQ ID NO: 1024 - DNA, 298 bp, Gossypium hirsutum
  Clone ID: LIB3493-055-P1-M1-F8
gccagcggggtgagagatcaaaggtaaaaaatgatcaggaacctgatcaaatgcaagcggcgcctgatcgaaaagaagctgcaaagataactgaaggatcaactccaaatgatttacccggcagcaaggccatagatgcaatattgtccaacagcggtttggatttgatggctgaagttcagagtgtttctatttccagtcaaaacagggaatccagtgaaagttttacacccaacaatttgaatttcactactgtgtcgaacaagaaaagtcctaaatttgaagcgggagcccttga

SEQ ID NO: 1025 - DNA, 277 bp, Gossypium hirsutum
  Clone ID: LIB3493-055-P1-M1-F9
gcgcccacgcgtacggtagtggctgggtgtccaaacaggaccgaagttattagaaacctttttacgaagaaccagagaaaatcaccttttcccattcactgcatgccgggtgagcagtgctagctgttttagcagagagcagtgcatatgaagaagggaaagagaagatagaagagaaagctgtagtgagtgaaagccatcttacccccggattgggtgataaatacattctattattgtgggggtggggattgggtgattatccagaaagggggtt

SEQ ID NO: 1026 - DNA, 265 bp, Gossypium hirsutum
  Clone ID: LIB3493-055-P1-M1-G1
ctagtcttcaccattttctgacgatggagttgttagggatgagtccgatgaggaccaaaatgaccaggatagtcacagtcctcttggtgggttttatattgggtgtaagaagtggtgaggccaggaaaggaaaggtgacagagtcctttgcgtacactgggataagttgcagacaacacactggattaatcacagacttttgaggagttggggattggaaaacattcaatacttaaagccttctcaggatgcagtttaatcattt

SEQ ID NO: 1027 - DNA, 404 bp, Gossypium hirsutum
  unsure (1)..(404): unsure at all n locations; Clone ID: LIB3493-055-P1-M1-G10
cccacgcgtccgttttgccaagaaatatccgcaatctttccagaggttgttgcacaaacaagatgggaatagatctgaatgggaatatccatttgcagtagctggcatcaatatttcatttatgttggtacagatgttggatctgcaatcagggaaaccatcttctagggctggaagacgatttttggaactacttgcagaagatgaaatggcatttgacgatctttattgtgtgacctttcaaatgatggatgcacaatggcttgtgaaacgggcttcatacatggaatncaatgaaattctgaagtctacaagaacacgggtagagcactaactcttacttgaaagtgtcctccgattgaaagatttaccagcctatagtcttgtaaaaaggtaattatgat

SEQ ID NO: 1028 - DNA, 309 bp, Gossypium hirsutum
  Clone ID: LIB3493-055-P1-M1-G11
gccggattgtctggcgccaatggctcgtcttccattgttattaccgctggtatcgctgaggttgccgctggagccatctctatgggacttggcgggtatcttgcggctaaaagtgaagccgatcattacgcgagggaattgaaaagagaggaagaagaaattatcagtgtgcctgatgttgaggctgctgaggtggctgaaatactagcagagtatggggtagagccacatgaatatgcacctgtggggaatgccctaagaaaaaggcctcaagcttggcttgatttcatgatgaaagaaaacctttga

SEQ ID NO: 1029 - DNA, 302 bp, Gossypium hirsutum
  Clone ID: LIB3493-055-P1-M1-G12
ggaaaaagaagtagctcctataatggcagagtactgggagaaggcagagtttccattccaaattgttcccaaacttggtgctcttcatatttctggtggtactatcaagggttatggatgcccaggtctctccctcactggaagtgctattgcaatggcagaggttgctagggttgatgcaagttgctcaacttttatcttggtgcactcatctctagccatgcttacaattgcattgtgtgggtcagaggaacagaaacagaagtatttaccatcattggcacagttaaaaactgtagctt

SEQ ID NO: 1030 - DNA, 335 bp, Gossypium hirsutum
  unsure (1)..(335): unsure at all n locations; Clone ID: LIB3493-055-P1-M1-G3
aatttccggagtgaccactctcggcaccgtggctagagtccgcccagaaacagccctgatcgagtgcttcctcaccaatcagccttggctttcccacgcaccatcaaagccctgtgaaaacaatcttgcctaacggggtgtgtagggtcttaaatcgaatcattatgaggtagtgcttaacactgtcttttattntaaaacagctaacaatttcaggttttttacctttccttttataggcgctggcaactgaatctctcacttaaaacgcttccccaccctgctttctttccaaagagggattttttcccttccccctttaactttacgctttt

SEQ ID NO: 1031 - DNA, 278 bp, Gossypium hirsutum
  Clone ID: LIB3493-055-P1-M1-G4
aataaagataatttaacctatggtcaaggtccacccgagtctgtttctcctctttaaacttggcttgactccactgttgcatttgaaatcccaatctatcaaagcttactcaaaataccaccagggatgtctttccaccattttctaaccatctcctcaaaagaattctccaaacaccacttagcctcaaaccgaaagggcttaatctggttattccgatcatacctacctggccctttggtatcaagaagaataagacaatggtcagaaaaagaatg

SEQ ID NO: 1032 - DNA, 313 bp, Gossypium hirsutum
  Clone ID: LIB3493-055-P1-M1-G5
cccacgcgtccgcgagagaaaagagcgtgtcccacttcccgaacatagctaatgaatgcctccaacatggccttgatataactcagcagccaattcccgtggttcctgctgctcattacatgtgtggtggcgtgcgtgctgggctccaaggagagacggacgtgcatggcttgtatgcagctggtgaggttgcatgcacaggtttgcatggagcaaatagacttgctagcaactcattacttgaggcgttgggtttcgcacgaagagcggtgcagccctctatcaatcacatgaagagagttagggttgatct

SEQ ID NO: 1033 - DNA, 424 bp, Gossypium hirsutum
  Clone ID: LIB3493-055-P1-M1-G6
ggcagttgtgtggatgcagaacgaactgatggagaatcagactcaagaccgcatattggactatgccaatcagctttgtgatcgggtgccaaacccaatgggagaatctactgtcgactgtggaagtctttcttccatgccaaccatttccttcactattggtggcaaagcttttgagcttacaccagaagagtacattctgaaggtgggtgaaggtgctgaagctcaatgcatcagtggctttactgctttggatgtccctcctcctcgtggaccactctggattttgggagatgtgttcatgggtcgctaccacactgtggtcgattttggtaaacctaaaattgggtttgcagaggcagcataaaagggacctgagggtttcaatggccctaaactatatatggggatggtttaaatttat

SEQ ID NO: 1034 - DNA, 293 bp, Gossypium hirsutum
  Clone ID: LIB3493-055-P1-M1-G7
caaaactgtcacgggtcttttgagaatgattgagggtgagaggttaggtgaagtggttgataggactctccttaaccatcttttgaagatgtttactgctttaggtatttactttgaaagctttgagaagcctttccttgagtgcacatctgagttttatgctgcctaaagaatgaaatacctgcatcaatcttattttccagatttccttaagcttgctacgtttaaattccctacaaaccaaataatcttttttccacacctgggggtaaatttcataaaatccctttttt

SEQ ID NO: 1035 - DNA, 235 bp, Gossypium hirsutum
  Clone ID: LIB3493-055-P1-M1-G8
cggacacgtttgagaatggacgggcgcgagatcaacgtggagactatggccgactcgccgttggtgaagaaatcggagacgttcagggaccggactaactaccagcttccgccgagctcttctccggcttcggggaagctgaggaaagagcctgcgctgagtcaagacgagttgaaacttctagtggttataaacataaagaaattctatggggatatgacatttctttggcagg

SEQ ID NO: 1036 - DNA, 88 bp, Gossypium hirsutum
  Clone ID: LIB3493-055-P1-M1-G9
ccctacctggctcgtaagctttctgtcgtgctctccaaacaagtttgagaaactttattttttaacaaataacaatgaaggcttcatt

SEQ ID NO: 1037 - DNA, 195 bp, Gossypium hirsutum
  Clone ID: LIB3493-055-P1-M1-H1
cggacgcgtgggaaaaaaagaactggaccacgtccttgtcctgtatgttatcttcccgtggaggaagctgttgccttgatgccaaaagtcccatcgttttctcctggtattaaaaatttaatatatatttttgaggaaaatttaaatagagaaacggaatttggaggttccgactctggtggggattctactttt

SEQ ID NO: 1038 - DNA, 235 bp, Gossypium hirsutum
  Clone ID: LIB3493-055-P1-M1-H10
cggacgcgtgggaaaaaggggggtcctttcagaacttctcatgatatagtgggacgatcagttgcactatgtgtgtctaagaactgccaacttcaagacctgagtctagaggacatgagaaacctaagtcctgtatttgataatgatgtgtatgagtttcttggagtagaaaatgcagtgaagaaattcagttcatacggttcaactggttttgcatgcgttgcctatcaacttt

SEQ ID NO: 1039 - DNA, 273 bp, Gossypium hirsutum
  Clone ID: LIB3493-055-P1-M1-H11
gacaaaatgtgggacgatgtaggagctgggcctccacctgaacgtggtctcggcaggcttaggaagatcaccacccagcctttgtccatcaaagatgaaggagaaaggaaaaagtaccagaggtcgttgtcgctgccgaatagtccagtgtcaggtccgacacccgtgacaccgacgactccgacggcgcgtaaggagaacgtgtggaggagtgtgttccatccgggtagcaaccttgccacccaaagtatatgttctgaaattttcgacaag

SEQ ID NO: 1040 - DNA, 213 bp, Gossypium hirsutum
  Clone ID: LIB3493-055-P1-M1-H12
agaaaaagcacggttgcaagcagaggccaaaaccccgggaagaggcaggggaaaaacttaaacttaaactgcttgtgaaaccaaaaaggaaaaggagcttgaaaaagaagcaacacgtcaagctcttttaaagatggagaaaacagtggatatcaacgagaacagtcaatttatggaagatctagagatgcttactacgaccaatgatgaaac

SEQ ID NO: 1041 - DNA, 236 bp, Gossypium hirsutum
  Clone ID: LIB3493-055-P1-M1-H2
tagcaatgattaacgtgcacgagctaagggacaaatcaaagacggagctgttgagccagctcaaggaattaaaagctgaactttctctacttcgtgtagcgaaggtcactggtggtgctcccaacaaactctcccagatgttactcatttccggtcttttttttgatttccatttgttttttcttttctcgattttagtatggggttttttaactcttttgggggttgggggattt

SEQ ID NO: 1042 - DNA, 138 bp, Gossypium hirsutum
  Clone ID: LIB3493-055-P1-M1-H3
ttttgaattagatgattattggaggagggtggagattttacataacaaattggacaaatttgaaagaaagacatggagaacctcttacaattctttgatagagcttgaacatttgttggctcattgacccatattgta

SEQ ID NO: 1043 - DNA, 279 bp, Gossypium hirsutum
  unsure (1)..(279): unsure at all n locations; Clone ID: LIB3493-055-P1-M1-H4
cccacgcgtncggcgagataccatatatggctagggactgctatgatatgctttgctacttttcatggtgccagcactttgttcatctggggtgttagccactacattcaggatgagataacaaaatggcagaggacaggccggatataccttgccggggagataacactggttgtgggcttggttatgtggatcacatcacttcctcagatcaagaggaaaagatttgagatcttttattacattcaccacttggacataatcttgccagtatttttt

SEQ ID NO: 1044 - DNA, 392 bp, Gossypium hirsutum
  unsure (1)..(392): unsure at all n locations; Clone ID: LIB3493-055-P1-M1-H5
gaaatctccaagcaggtcaagggaaaactaggcaaggtagatgactacttcaacaagctggctgatgctatggtgacctggatcgaagcatgggatgagctgaatccatctggtgcaaaatccgccgagctgtccaatggtgcttcgaagtaagcttgttcagtaagcagctaacatattgtttagcagccccaggcttgtttggggatcaccgacacttgccaaagctccattgcttggagtgcttattttgcaggttggaggaggatgggcacattgttattttatcatattattaccgagtttagaacaataaaaaatggatggctttatggcttcttatgtatttggcactagaaaangatggcttatatcttaaattatttttattt

SEQ ID NO: 1045 - DNA, 376 bp, Gossypium hirsutum
  Clone ID: LIB3493-055-P1-M1-H6
cgggagagaaaatcggatgcgggggggggggcgatttgtctgcggcttctataaggaagaaagctattgaagttggtgctagagttgatgctcttgaagcagcagcagcccatcatcatcatcatcatcatcatcatcatcatcatcatcatcatggtcatagctataatgggggtgactatggcgatgagttaaagcccagtaatggggggtttttaaatcgggttgatttgaacaagatgcccgacccggaaaattcggatggggaatggttaaggggatttgattcaatcatggccctccaaatggttataaataaaaattaattttttttggggggggggggggcccttcttagggcgggtgggaaccgttt

SEQ ID NO: 1046 - DNA, 187 bp, Gossypium hirsutum
  Clone ID: LIB3493-055-P1-M1-H7
gtctcctctccataaatgtctgagtcaacgcagagcgaataggcggagacttccaagaatctatcgcatcagctaatcacgctctaaagaatggatcaggttcaacacccatctatcatgcagaaggtagcaggccagctccttcgttctagccattcttaagattttcaagggtataatgggtctt

SEQ ID NO: 1047 - DNA, 292 bp, Gossypium hirsutum
  Clone ID: LIB3493-055-P1-M1-H8
atgatcctataacaaatacagtcactgtcattgatgaggaataccggaatcagtgtgctgccaattcactgagctcgaagggtatgtttcaattgatccacaggagtggttcttctaggcaactaatggctcttcttaacaaagatggatctgtggcgaaggcttggtcagttgaatccattgatagtaatgggaggcccatctctggccatggaactgagggtttgagttggattccctttgatggaccttttacaaatcagttagggctgaccctgttaaatttttaatt

SEQ ID NO: 1048 - DNA, 118 bp, Gossypium hirsutum
  Clone ID: LIB3493-055-P1-M1-H9
cttccggacatcaacacgagtgcgaaaataacttctcttgctctgaaagaatactacccacaggcatgaacatcaaacaccccctctcttcccttttcctaaccttgctctttttcta

SEQ ID NO: 1049 - DNA, 372 bp, Gossypium hirsutum
  Clone ID: LIB3493-056-P1-M1-A1
cggacgcgtgggtctcagttgagaacgaatataagccagatacaccacatggtaatctcaaccaatcctcaacatcttatgtctatgaaatggaagatacaaatcagttacaggattgtttaccacaggatgagcttgcaattcaagcttttaatccaacgctaagaaacagcttcagaatgggggggatcttccattccaatggagagaacagtttgtcatttttgtcagatgaccattttgctacagaggataattctgaagctgaaatgccaatttggatttcaactactccagcatggggatatgccagtggatctgtttcaaccccggcagcatccgaatcgtcttctacaaactttgatgtcaata

SEQ ID NO: 1050 - DNA, 176 bp, Gossypium hirsutum
  Clone ID: LIB3493-056-P1-M1-A10
cggacgcgtgggatgacattgggatgctgttttaatagttggttatggttcaaaaggcagtgaagagtattggatagtgaagaattcatggggaacaagttgggggatagatggatatttctatctaaaaagagacactgatttaccatatggtgtttgtgctgtcaatgccatgg

SEQ ID NO: 1051 - DNA, 363 bp, Gossypium hirsutum
  Clone ID: LIB3493-056-P1-M1-A11
tatttatgctgcgtaaactgagccccttcagcttgcttaacgcttttgatcaatactatttttttgtgcgtctttctgcttctctggctcatattttctcgagattttccttctttgtttgcttgaattatggcttcaaccttgctactggctctggtttttgtgattgatctgattgctttcgcccttgctgttgctgctgagcaaaggagaagtactgccactgttggcaataatgggaaagaaagttattgtgtttatgatgaggatattgcaactggttttggtgtgggttcgttcctcttccttctgcttagtcagatactaataatggtgacaagtcggtgcttatgctgtgggaag

SEQ ID NO: 1052 - DNA, 339 bp, Gossypium hirsutum
  Clone ID: LIB3493-056-P1-M1-A12
ttgttatcaatctcattggaagagagtatgagacaagaaactttagctttgaggaagtgaaccatttcatggcagaacaactggcagtgattgccaaagaacatggtggtatcatgagatttattcaagtttcttgcttagggtcttctctgacatctccatcaagatttctaagagctaaagctgctggagaagaagctgttttgaaagaacttcctgaggctactggcatgaaacctgctgtaatgattggtactgaggatcgtattatgaatcgatgggcacattttgcaaagaaatataagtttcttccactcaatggtgggggatctaccaaaa

SEQ ID NO: 1053 - DNA, 375 bp, Gossypium hirsutum
  Clone ID: LIB3493-056-P1-M1-A2
ggaatttccacatcttcctctagctggcatgagagaagtggaggacgcacatatgatcgtgagtctcgcgacagtcgtggtttccgtgatagttatgacaagggaagaagtcgcagtcgaagtcctgcaggttggggtgatcgccataaaactggtgtccgtgaccgcagctggagtcgtagtgctgaaaggtatgatagtggtgctggacgtcaacgttccccaacgcgcagttttcttgaggtggggatgaaacgggaccggttgtctccatcccaacaacgtgggccacttcaaaataattagaattcaatcgaacactgaaattcatgtagcccaattcttgagaggtcaaggtcaccttatgctggtgat

SEQ ID NO: 1054 - DNA, 370 bp, Gossypium hirsutum
  Clone ID: LIB3493-056-P1-M1-A3
atcctagcctttatacaccgtagggggtggatctagttctcgcaggtcatccgctattgacaacgccgatagcgacacatctcaccggcaattccttttcacccagaggtggattatatacaattggggatctcatcactgcaaaagaggatttgcatgttactcaagccaacaacaactgctgatgaagcactgcaagctcttgctgaacacacaatcacctggtatactgatatcgatgatgatacgaaataggacagactagcatctgattatgacttgctcgcatagaactccatatctgcgcggcggactgagaatgacctgtttcctgaacttgatagcactcataaaactttcaacgagatac

SEQ ID NO: 1055 - DNA, 150 bp, Gossypium hirsutum
  Clone ID: LIB3493-056-P1-M1-A4
atggccaaacaatcaggcaagacggtgctccaactccttccttctttggtcaaatcagcccagtccgttgcccgcccgccgatctcgaagtaccaagttggggcagtcgggatcgggtcatccggtcggatctttttcggagccaattta

SEQ ID NO: 1056 - DNA, 294 bp, Gossypium hirsutum
  Clone ID: LIB3493-056-P1-M1-A5
ctaagtgtctgagtgaaaatatgccagcgttcatatctaaacctacatagttactatgactctttaaatgtagccaaatctctcttcatctaactagtgacacacatgaatggattaacgagactctccactgtcatgcttactatccaagccaaccacagacaaattaactgactcaacagaatcatcaagcaaagaataccctgtatagctcgacactagatctactctgtgtaacgactttagaggtgtaagataagtctcatctctcaaacgaactttatataccactac

SEQ ID NO: 1057 - DNA, 372 bp, Gossypium hirsutum
  Clone ID: LIB3493-056-P1-M1-A6
ggggaacaagataggctatgtggtgtgacccttttaaaattgaattgaaagataacccattggattacattcgtgatgccaaagcaaaaattgatagaaaaaaagctactcttgaagctaaattcagactttttctggctaaggtttttgtgaggttttatcctaccaaactggccaagttcccatcaacaactatgtggttttccaatgtggcggggcctcaggagccaattagcattcttgggaatcaagtggccttcatcgctccatcgatatatggtcaaccagtggcgctcacaattcatgtcgttagctatgtgaacaagatgagtatggtgctatcagttgatgaggacattattgccgatccct

SEQ ID NO: 1058 - DNA, 368 bp, Gossypium hirsutum
  Clone ID: LIB3493-056-P1-M1-A7
ggggaacaagataggctagtgttctctacccttttaaaattgaattgaaagataacccattggattacattcgtgatgccaaagcaaaaattgatagaaaaaaagctactcttgaagctaaattcagactttttctggctaaggtttttgtgaggttttatcctaccaaactggccaagttcccatcaacaactatgtggttttccaatgtggcggggcctcaggagccaattagcattcttgggaatcaagtggccttcatcgctccatcgatatatggtcaaccagtggcgctcacaattcatgtcgttagctatgtgaacaagatgagtatggtgctatcagttgatgaggacataattgccgat

SEQ ID NO: 1059 - DNA, 369 bp, Gossypium hirsutum
  Clone ID: LIB3493-056-P1-M1-A8
tggtacctttgtccttgggtagcgctgttttctctgcaactgatcccaagaggaatgcaagagattctcatatccctgtcttggcaccacttcctattggatttgctgtgttcatggttcacttggcaactattccaatcaccggcaccggtatcaaccctgctcgtagctttggggccgctgttatctacaaccaggacaagccatgggatgatcattggatcttctgggttggaccatttattggtgcagccattgctgcaatctatcaccagtttatcctgagggcagctgctgttaaagctcttggatccttcaggagcagctctgccatgtaattaagcaaatcattctccagccacaagttta

SEQ ID NO: 1060 - DNA, 372 bp, Gossypium hirsutum
  Clone ID: LIB3493-056-P1-M1-A9
cacaaatcttcttctccttctgagaaatcttagtatcatcactatggcctcaaatcccaaggtcttctttgacatgacgatcggtggtcagcccgctggtcggattgtgatggagcttttcgcagattgcactcctcgcactgcggagaacttccgtgccctctgtactggcgagaaaggcgtcggccgcagcggtaagcccctccactacaaaggctcttctttccatcgtgtgatccctaactttatgtgccaaggaggtgacttcaccgccggaaacggtaccggaggtgaatccatctactgatccaagttcgctgacgagaacttcatcaagaagcacactggtcccggtattctctcaatggctaa

SEQ ID NO: 1061 - DNA, 363 bp, Gossypium hirsutum
  Clone ID: LIB3493-056-P1-M1-B1
tgcgatttcattacccagaacgggatggctttggctattcgtaaaactggtaatttgaagtcgattttcatgaacggaattggaattccttctttagatgtatgttttctggattccttttcctatgccagaagcttatgcgagcttgatctctccaattcgtttatatccgatgaattgttgtgtttagtagctgaggcaaaccttccgttaaacaagcttgttctctctcgctgcttttgcttcacatttgatgggatttattttctcttgtccaagtaccagttccttgcatacttggatcttgaaggagcaaattttctcaatgacgagtccataatagaattagccaagttttttggt

SEQ ID NO: 1062 - DNA, 359 bp, Gossypium hirsutum
  Clone ID: LIB3493-056-P1-M1-B10
cgaaaatgccaactggctagctatgtatgctgccatctgccagcaatgtggccttgtccccattgtcgaacctgaaattcttgttgacggatcacatggcattcaaaagtgtgctgcagtgacagagcgtgttcttgctgcttgctacaaggctctaaatgaccaccatgtcatgcttgagggtactcttttgaagcctaacatggtgacccctggttcggactccccgaaggttgccccagatgttattgctgagaatactgttcgtgccttgcagcgaaccgtccctgctgcagtcccagctattgtattcttgtctggtgggcaaagtgaggaggaggctactcttaaccctaatg

SEQ ID NO: 1063 - DNA, 261 bp, Gossypium hirsutum
  Clone ID: LIB3493-056-P1-M1-B11
cggactcctgggcggacgcgtgggccgactcctgggtgctggtccagccttcacgcatcttatcaaggtttatcacgaagagcatcatctgttaattactcacggcatctatagattcgtccgtcatcctgggtactctggtttcttcatttggtcagttggcactcaaataatgctttgtaatcccatatccactgttggttttgcaattgttgcttggaaattctttgcttaaagaataccttatgaagaggttttctt

SEQ ID NO: 1064 - DNA, 290 bp, Gossypium hirsutum
  Clone ID: LIB3493-056-P1-M1-B12
gttgaagcactttcaagagctcagcatccaaatcttgtccatctacaaggatattgcatgcataaaaatgacaggctcttaatatattcttacatggagaatggtagcttggactattggttgcatgagaaggttgatggaccatccttgctcagttgggaaacaaggctgaaaatcgcacaaggggcagctaggggtctagcttatttgcaccagtcatgtgaacctcatattcttcacagagatataaagtcaagtaacattcttttagatgagaattttaaagctca

SEQ ID NO: 1065 - DNA, 374 bp, Gossypium hirsutum
  unsure (1)..(374): unsure at all n locations; Clone ID: LIB3493-056-P1-M1-B2
ggaagaaacttggattgtatttctcagcatcttggtgcggtccatgccgtanattcaccccaaatttaatcgaggtgtacaccgagctctcaacgaaaggcgatttcgaggtcatttttgtctcggcagatgaagatgaagagtcattcaatggttacttctccaagatgccatggcttgcaatccctttctctgattcagaggcacgcaagcgcttagatgagccgttcagtgtgatgggaatacctcacctcgtgctcttggatgaaaatggtaaagtcttgaccgaagagggggttgagattattcgtgagtatggagaggaagggtaccctttcacccccgagaagatccaagaattaaaagatttagaa

SEQ ID NO: 1066 - DNA, 371 bp, Gossypium hirsutum
  Clone ID: LIB3493-056-P1-M1-B3
gttgaattgcctcatgtaagtggtctaggttattacttctctctcgattggggcatgtgtgtatatctattcattatttggtataaggattttggatgttgagaaatctttgcatttaatttttatactatctttttctctgattttatctattgaagaacttcctgaaaatgttagctgattttgatgtcttaaattttgcagccattgatgcttatctatacccctcttgaaacagatgttatcgtctagctttccgaggctagttcttaatatatgaatttttttcttataccagttggagtttcttaattattaatttactatgatgtcatatttaaggcctctcgagtattttgtactgacttggt

SEQ ID NO: 1067 - DNA, 364 bp, Gossypium hirsutum
  Clone ID: LIB3493-056-P1-M1-B4
ctgttacttggtctctgccacatgaggacagcatcaaggcgccttgctgacagcatagtgttgaagttcgcaacgaacataacaaagagaggagctgttcctgaaacacgcacataaaaggggaaggattatcctgttggccctatgctgcttgggaacttcgatatcgtgtcattggatcatctctcttccagatgatgacgacagcgactcgcggaggcatggcataaagctgtatatatcctatgttaaaaaaaaatgcagaagagactagttatgatctttttctatagagttgtagcgaactgatgatataatatgtctactagacatgcgttgaaactcatgttgtgaagatttcaaa

SEQ ID NO: 1068 - DNA, 372 bp, Gossypium hirsutum
  Clone ID: LIB3493-056-P1-M1-B5
gtcatatttcaaatgtcgtttgttcagctcaaaagctacagacaccaaaggaaaaagttgatatggaagcaaaactgcaagcttggcttgaatcaaaaggcaagacaaagagtgcacaaagaatgggaccattcgcttctcgattagtaggcaaaacacccagttccatacgctctatgaagaagcttgattccaacagctcttgcaaagtaaaaaattctaccaaagatgatccttctaataccaaagacaggggcttatccgtgacttccagaaatttattcaacaatgaagatgttgttgatattgagcagatcatgttgaaacccactatgaacttagctgaagaatcatccggcaaggaagagacta

SEQ ID NO: 1069 - DNA, 364 bp, Gossypium hirsutum
  Clone ID: LIB3493-056-P1-M1-B6
ctctctctctctctctctcttgaaacactcgaaaattcgtatttaaatacgtacggacgggttagtcagcagatcggaacggaggtggtagcggcggcggcggtttgatatttgatctgatcgtgatccaaatggctgaggacaagtataacctcaagaatccggcggtgaagaggatattacaagaggtcaaggagatgcaatccaatccttctgatgatttcacgagcctccctcttgaggagaatatatttgaatggcaatttgcaattaggggtcccagggattctgaatttgagggagggatttatcatggaaggatccaattgcctgctgagtatccattcaagcccccttcatttat

SEQ ID NO: 1070 - DNA, 371 bp, Gossypium hirsutum
  Clone ID: LIB3493-056-P1-M1-B7
ctctctctctctctctctggtgaaacactcgaaaattcgtatttaaatacgtacggacgggttagtcagcagatcggaacggaggtggtagcggcggcggcggtttgatatttgatctgatcgtgatccaaatggctgaggacaagtataacctcaagaatccggcggtgaagaggatattacaagaggtcaaggagatgcaatccaatccttctgatgatttcacgagcctccctcttgaggagaatatatttgaatggcaatttgcaattaggggtcccagggattctgaatttgagggagggatttatcatggaaggatccaattgcctgctgagtatccattcaagcccccttcatttatgttgctg

SEQ ID NO: 1071 - DNA, 356 bp, Gossypium hirsutum
  Clone ID: LIB3493-056-P1-M1-B8
cggactcttgggcgggctgatgcctagacttgcaggcaacatcggcacacctttgcggccaggatatttagaagtgtacttatttggccttctagatgaagatgtaaagagtgttgctcctggaaactttgagcggcattggggaatctataggtatgacgggcagcctaaattcccacttgatctttcaggccagaatcagaaccggttcctcatccctgctcagaatgtcgaatatcttcctcagaaatggtgtatattcagtccaaatactaatgacctaagcaaacttgcggacaacataaactatgcctgcaccttctccgattgcacagcacttggctactgatcttcat

SEQ ID NO: 1072 - DNA, 287 bp, Gossypium hirsutum
  Clone ID: LIB3493-056-P1-M1-B9
tcttcctcggactcttgggctgactctgtgggcaacaggtgagggaaaaaagagaaggatctgatgtacctgcctgttgatcttaattatacacaagatcatgatggcccttgaaaataaagaaactatgcagaactgcgaggcaaccttaaaatgcctccagacgaaggggttccctgacaacctgcaatgtactgggaactcaattgaaggccgtccagagcttaaagatgaaatttgtactcacccaggtggggatgtttgaaaacctgttcgctttttaaatg

SEQ ID NO: 1073 - DNA, 368 bp, Gossypium hirsutum
  Clone ID: LIB3493-056-P1-M1-C1
cccacgagggtgataccccactggaaaagcgaccaaggatatgcagtcctgtgatagagaacaaagaggatagtactaaatgttttgacagtaaggaatctgagaaacctgacaacacaagattgctggatttaactgctggtgaaaaaatatttaatatcggtaaaagcaccagagacgagagtaagcctggttcactcagaatgaaacgttctggtttaaagaaagaaggatcaagggttatttttggtgttcctaagccaggaaagaaaagaaagtttatggaagtaagcaaacattatgttgcggatcggagcagtagaactcttggaacaagtgattcagctaaatttacaaagcattcaatg

SEQ ID NO: 1074 - DNA, 357 bp, Gossypium hirsutum
  Clone ID: LIB3493-056-P1-M1-C10
gcttaagcggtataatctgactgttagcactctaataaataacttggcccttcatcacgtcacgtttccgagggttctgcctttctctttcccactgtattttccttttcttgcttcccaaatattcatttcaacgccagaaaaaatgagtaacgatgacgcatccgatctcggcgtcgccctccccgccgccgctgccgctttgagtgctgaggaacgcgccggcctggttaatgagcttaagaataagcttcaaaatttagcgggagaacatgctgatgtgctagaaacactatcaccaaatgtcagaaaacgtgttgaggttctcagggagattcagagtgaacatgatgaact

SEQ ID NO: 1075 - DNA, 366 bp, Gossypium hirsutum
  Clone ID: LIB3493-056-P1-M1-C11
ccgccggcttcatttgagattggaatgcgagttaccttccctgcttcttcgtctagagtaaaggcgactgaaaggtttgaggccatctatcccacagtaaaggaagtgggtcttgctggttctcacggaagcaaagcgatgaaacaagtgtctctgcagatatttcattttgctttcaaagcggccggtgacggcactcctgagttgtccaaagaagcagccggaatagtcatatggtctttgaaccagaatgctgaatgctacaggatttgggagaaggcttatcttgacaatctagaagcaagtgttgctgttcttagaagactttcggaggattggaaacaacactcaacaaaacttactact

SEQ ID NO: 1076 - DNA, 250 bp, Gossypium hirsutum
  Clone ID: LIB3493-056-P1-M1-C12
ctgagatcgtcaagtcagacccggttgtgtccttccgtgagactgtccttgagaggtcttgcaggactgtgatgagcaagtctcctaacaagcacaaccgtctgtacatggaagctcgacccttggaggaaggtcttgctgaggccattgatgaaggtcgtattggtccaagagatgatcccaaggttcgttccaagattttggccgaggagtatggttgggacaaaaatcttgctaaaaagatttgggg

SEQ ID NO: 1077 - DNA, 370 bp, Gossypium hirsutum
  Clone ID: LIB3493-056-P1-M1-C2
caaatgagccccatatgtcacaggggatggtcaactttgattacaagggtaaagactacaggtctcagtttcaaatgggaaatggtgctttatttggagctagttatatccagagtgtgacaccgcatttatccttagctggtgaagtattttgggctggtcagcaccggaagtcaggccttggatatgctgcccgatatgaaacagataagatggtagctgcagggcaagttgcaagtaccggaatggttgctttgagctatgttcagaaagtttctgagaaggtttctctagcatcagatttcatgtataactacatgacaagagacgtgacggcaagtgtgggctatgattacatccttagacagtg

SEQ ID NO: 1078 - DNA, 371 bp, Gossypium hirsutum
  Clone ID: LIB3493-056-P1-M1-C3
gcacattccctacagggaaaagagagattctgactggaactgctagatatgcaagcatgaatactcacttaggcattgagcaaagccgcagggatgatttagaatctcttgggtatgtgcttatgtatttcctaagaggaagtcttccttggcaaggtttgaaagctgggaataagaaacagaaatatgagaaaattagtgagaagaaggtttctacttcaattgaggccttatgtcgaggttatccaacagaatttgcgtcatacttccattattgccgttctctaagatttaatgataagccagattatgcttatctcaaaagaatctttcgcgacctctttattcgtgaaggcttccagtttgattat

SEQ ID NO: 1079 - DNA, 250 bp, Gossypium hirsutum
  Clone ID: LIB3493-056-P1-M1-C4
tagatcgcgggccgccctttttggggttttttttaaaggaaaaggaaaaggaactgtactccatttaaataaagcaaagtttgaggcacattaaaaataagtgccacatgcatagagaagaagcattacactttgattattctttacaaattcaatggtctgaacaaaacttcatttcattcatccaagcatgccagcctttactttgaactcatggctgcacagtgcttgcttcaacagattttacatg

SEQ ID NO: 1080 - DNA, 373 bp, Gossypium hirsutum
  Clone ID: LIB3493-056-P1-M1-C5
cagaaagcgaaagtctcccaaggttagaacccaaaatccaacaaaatcaaaaatcagtgagtgaagagagagtggcgcttgtgttttggcatcatctttccattgtttttaatcgtttgatgcgtcggtgattgatcgaaaagatggcgattcaccgtacagcaagaaacagcggcgtcggcgtcggaggagcaggggcgacgatcggaggttttggatttacagttagattattggcttctgcaattacgtttgcaatttgtttcttctttgctctttctttcttcttcacttaccactctcactctcctcatcttcaaacaaaccttggtttctcaactgattcctatggaatcggatccacgaggaggtc

SEQ ID NO: 1081 - DNA, 370 bp, Gossypium hirsutum
  Clone ID: LIB3493-056-P1-M1-C6
caactgtctttgaaactgctggcgtggcttcagagtctgcaaacatgtgtgtgggaattgccaatttgttaggatcatttgttgcaatgattttgatggatagactgggaaggaaggtacttctcattggaagcttttcaggcatggtagtggcaatgtttcttcagataacttcagctacttccttagtctcaagaggcagtggagtttatctctctgttggaggcatgcttttgtttgtcttgaccttcgctattggagctggaccagtccctagtatcctactatcagaaatgtttcctggtcgggttagggcaaatgcagtgtcagtttgcatggctttccattggattgtaaatttctttgtggg

SEQ ID NO: 1082 - DNA, 365 bp, Gossypium hirsutum
  Clone ID: LIB3493-056-P1-M1-C7
caactgtctttgaaactggtggcgtaccttcagagtctgcaaacatgtgtgtgggaattgccaatttgttaggatcatttgttgcaatgattttgatggatagactgggaaggaaggtacttctcattggaagcttttcaggcatggtagtggcaatgtttcttcagataacttcagctacttccttagtctcaagaggcagtggagtttatctctctgttggaggcatgcttttgtttgtcttgaccttcgctattggagctggaccagtccctagtatcctactatcagaaatgtttcctggtcgggttagggcaaatgcagtgtcagtttgcatggctttccattggattgtaaatttcttt

SEQ ID NO: 1083 - DNA, 363 bp, Gossypium hirsutum
  Clone ID: LIB3493-056-P1-M1-C8
cttttccttccatatttggactgtgctttgctcctatcctttccaaatgtttttcttcttctttctcctttctttcgtcctctctttcttattcttattcttttcttttcactataaaaaactccataaacaacaacaactacaagaagaaggcaacccccagaatgattctgcccttttgaactgctgttttcccgatattgttggtacgagggcacaaacccggggaaacgactctactcatttgccccatactcttcttttacagattatgccttccgattctgcaaaatgggctggtttgtttaccggggagaaccaacaaaaaggggatgccagtcgggtcgggtcggatcgggatag

SEQ ID NO: 1084 - DNA, 362 bp, Gossypium hirsutum
  Clone ID: LIB3493-056-P1-M1-C9
aaataacaactcatttatgcggtgtgttttgtttggtgacttggtcgttgtcgtcttcttttcttcttcaatagaatcagaatgtcttacgcttacctcttcaagtacataattatcggtgatactggagtggggaaatcatgcctcctccttcagttcaccgacaaacggtttcagccggtacatgatcttaccatctgggttgaatacgaggccacgatgatcaccatccataactaacccattaagctgcacatctgggacaccgaatgtcaagaatccttcagatccatcacaagatcctactacagaggtgctgctggtgccctgcttgtctactatatcaccaggagggaaacttt

SEQ ID NO: 1085 - DNA, 365 bp, Gossypium hirsutum
  Clone ID: LIB3493-056-P1-M1-D10
cacaatgcaaggtttgtcagctctaaagaacttcctaaactggttgctgtcttatttgttgaacgtaatcttctagaggcaactatcttagaatttattgaaatgccaaaatatgcacgtttgtttttagtattaaggatgttatctggggttgagccgaactgtattcaaactgtgtgaaactatgagcttttcattcaaagtttgagacttgagtttggctcacgctcgatcaattttcgttttcgaagctcaaaatcgattcgcgatttaaaaaagaaaatgaactgctcatgtttgtttgattagactcgtttattggctattaaattcatgtatcaaacaattcagctgagttggatagc

SEQ ID NO: 1086 - DNA, 352 bp, Gossypium hirsutum
  Clone ID: LIB3493-056-P1-M1-D11
attttatttttatcaacggggaagaatatgcagagatcatcgtcattattaaacactaatcggctaatcttcgactaaatcttggagaacttgccgccgtctaccatggcaacgtgttaacttcttaaagccaccataccttcaacaatcgcttaccgcagtacggtgatcccatcaccgtgactaacaaaaacaaaattgcttacaatcgtcaccacgacatgactggagagacagcgattcacctaattccgggcgtatagggaatccgtgcttacactctctggtgcttctatctacctgcagatagagcaatatgatcagagaaccgccctcatcgcttaattatgga

SEQ ID NO: 1087 - DNA, 370 bp, Gossypium hirsutum
  Clone ID: LIB3493-056-P1-M1-D12
cacaaatctcccatttttcttgtccctaagacgcttcgccccataacccatctaacaatggtggcctcaaaattctgttttgctttttctcttgctattctttcaatcttggccgttgatgctgcccaacaccatgctctggcgccctctccttcttcccccgtggactgctcctctctgattctcaacatggcggattgtttgtcctttgtgtcgagcgggagcaagacgtcgaagccggaaggaacctgttgttctggcttgaaaactgtgttgaaagctggaccccaatgcttgtgtgaggcttttaagagcagtgcttctctgggtgtcactttgaatgtcaccaaggccatgactttgcctgctg

SEQ ID NO: 1088 - DNA, 367 bp, Gossypium hirsutum
  Clone ID: LIB3493-056-P1-M1-D2
gtcatttcctttttgcgccaccgtgtgtgttgtcatcattggcgatctcttctcttcttcttttcctctattctttttccttcatcgtagctgctatcaccccttctttttctccatttattttcctttttaccaaaactcctaatacttttcttcatcactattgtggccgaatcatctttgtttgctaaggtctttattgatttaccattctcgatcgatttttatgaacacttttatgttatcaatgttcaaggtttgaatctgaagaagatcagtccagatccgatgggtaggagtacaaccaattttgatctatagtcagataagggagtgacttgtccacatactgttggcagtctatttg

SEQ ID NO: 1089 - DNA, 374 bp, Gossypium hirsutum
  Clone ID: LIB3493-056-P1-M1-D3
tttcccctctccaatgctcccggggggcctccccttatacctgcccgccttccctcaaatctcgcctccgcaacggcgaaaccctctacggcatcttcctcctctcattctcccccactttggctgagatcgccgccttctctggctacgactttgtagtcatcgacatggaacacggccccgggggaatccatgagtccctccaaatgctccgcgctgtcgccacgaccaacaccccagccatcatccgcctccctgagtcctccgcagtttgggccaaaaaagcccttgaccttggtccacaagggatcatgtttccaatgatcgactcccctaaagacgctagaaaggcggtgtcgtattgccgtttccct

SEQ ID NO: 1090 - DNA, 346 bp, Gossypium hirsutum
  Clone ID: LIB3493-056-P1-M1-D4
cgaagaagttgagatagatcagcggagactcccagctgactatgatccttctaatttcgatcccaccgaacaccgcagtcctccaactgagcgtgtctggagactcgttgatgaaacttctggccttactttgtctgaaatttccgagttaggctctattataatgaagaaacgaggaatgattgagccgccgactgtgggagtcatgaaggctggtgctgctgccggcttggcaatgaagactgctggtggcggggcggcagcggcggcaaaggaagagaaaaagccagataagacagtttttgaattgaagttggagtcatatgaagctgcttcgaagattaaa

SEQ ID NO: 1091 - DNA, 374 bp, Gossypium hirsutum
  Clone ID: LIB3493-056-P1-M1-D5
cggacgcgtgggcggacgcgtgggtactcagccgctcgcataaagaaaaaaaagaagaaaaaacccaaaatttctccctttaatattcagctgaccgatggtcacccaaccggctgttcttctgcctctcttttggacccatagagtggtcaattgaggcttcattgaaccaaggagatccgtgggtcttgctcacaaaccccaaatcgccacttagtttcgattgtggcgaaacaagcggggacccgaaggcttcgaaatgcaggtgagtttctcctctttcttttgcccttttttgatgtaaaatgataaagaaatcgattgaaataagtagaaagaacagaggattaaaaaaaagaaggaaaaatcacctt

SEQ ID NO: 1092 - DNA, 376 bp, Gossypium hirsutum
  Clone ID: LIB3493-056-P1-M1-D6
tctcaaacaaatcttcttttatgggggtaactctctctctctcaaatcctcgattccacttcgctctccagatctccccagaagttattgaaatggcagaatcgaagtcattgaggaaacctgttttcaccaaggtggaccaacttcgccctggcactagtggtcacactcttactgtcaaggttgtcagcaaaaagatggtattgcagaagggtcgtgctgatggtcctcaagttcgtcaaatgcgaattgcggaatgcctggtaggagacgagacaggaatgattatctttaccgctagaaatgaacaagtggacttaatgaaagagggtgccactgtaacactccgcaacgcgaaaatagacatgtttaaagg

SEQ ID NO: 1093 - DNA, 372 bp, Gossypium hirsutum
  Clone ID: LIB3493-056-P1-M1-D7
tctcaaacaaatcttctggtagtggttttaactctctctctctcaaatcctcgattccacttcgctctccagatctccccagaagttattgaaatggcagaatcgaagtcattgaggaaacctgttttcaccaaggtggaccaacttcgccctggcactagtggtcacactcttactgtcaaggttgtcagcaaaaagatggtattgcagaagggtcgtgctgatggtcctcaagttcgtcaaatgcgaattgcggaatgcctggtaggagacgagacaggaatgattatctttaccgctagaaatgaacaagtggacttaatgaaagagggtgccactgtaacactccgcaacgcgaaaatagacatgttt

SEQ ID NO: 1094 - DNA, 369 bp, Gossypium hirsutum
  Clone ID: LIB3493-056-P1-M1-D8
aaccagagtactggaaatttggagaagatggaaacaagtatttcaggcatgccactggtcaaatttatggcatttccaaggatcttgctgcctatatttccatcaactcgcccattttgcacagatacgccaatgaagacgtgtcattaggatcatggttgattggcttggaagttgaacacgtggacgaccgttccatgtgttgtgggacccctccagattgtgaatggaaggcacaagcggggaacatatgcgtggcatcatttgattggtcgtgcagcggagtgtgtaagtcggtggagaagatgaaatacgtgcacaactcttgtggagaaggcgattctagtatttggaaatcagatttttaag

SEQ ID NO: 1095 - DNA, 369 bp, Gossypium hirsutum
  Clone ID: LIB3493-056-P1-M1-D9
tgctgatattaattatagtttggtttgtccattccaactatgctgcttacagagatagacaaccacaatcattaccagagcttgaattgtcagaggaaatggttaacaacgctgcagcgtcgtttcgtgttaaaatcaataacgtgcttcttatggctcatgatataactcttggcaaagattttcggctttttttcaaggttgtgacttgtctgtggctcttgtctgctattggtagctattgctctttcttcacgcttgcctatattggaaccatcttatcggttactcttcttgccttctacagcaaatacgaagagcctgtgaataaatactgtggaatgatccagcgaaagttttcccagcagt

SEQ ID NO: 1096 - DNA, 370 bp, Gossypium hirsutum
  Clone ID: LIB3493-056-P1-M1-E1
cttcaagtctcccttccatctgtgcggattgtccacaaagtcatatgtttgaaccaggtgcttataccttaatgaaccgttttgggacttttgtctataaaggagctgtgtttgctgctgttggatttgctgcaggccttgttggaactgcaatctcaaatgggttgatcatgatgaggaagaaaatggatcccagctttgaaacacctaacaagccacctcctaccttgttgaatgccttcacttgggctactcacatgggggttagcagcaatttgagataccaaaccttgaatggggtcgagtttttgttggctaagggacttcctcccctggcatttaagtcatcagtggtggttctgagatgctt

SEQ ID NO: 1097 - DNA, 225 bp, Gossypium hirsutum
  Clone ID: LIB3493-056-P1-M1-E11
cggacgcgtgggtttctggggggatctcataaaagctgtaatctgatggctgctaccatcgtttccattaaagctaggcagattttcgacagccgtggaaatccaacggtcgaggttgatgtggaaacatccaacggtaaaaaggctagagccgcagttccaagcggtgcatccactggaatttacgaggctcttgaactgagagatggaggttcctattttttt

SEQ ID NO: 1098 - DNA, 151 bp, Gossypium hirsutum
  Clone ID: LIB3493-056-P1-M1-E12
caattctaagatccttggggttgaaacagctattaggagaccttattttcatgcgcgtcctctcaatgttgctgagcttgaaaattggcataactacctggactttatagaaagtgagggtgacttgaataaggtatttgaggttggtttc

SEQ ID NO: 1099 - DNA, 373 bp, Gossypium hirsutum
  Clone ID: LIB3493-056-P1-M1-E2
aaatctcgaagcttccttttccgtggagatctcaaaattcaaaaagctctctttttcatctcatggctgctactatcgtctccgtcaaagctaggcagatcttcgacagccgtggaaatccaacggttgaggttgatgtggaaacatcgaacggtataaaggctagggccgcagttcctagcggtgcatccactggaatttacgaggctcttgagttgagagatggaggttccgattacctcggtaaaggtgtatcgaaggctgttgctaatgttaacacaatcatcggccctgcattgattggaaaggacccaaccgagcagactgcaattgacaatttcatggttcaacaactggatggaacccaaaatgg

SEQ ID NO: 1100 - DNA, 372 bp, Gossypium hirsutum
  Clone ID: LIB3493-056-P1-M1-E3
ggaggtgacacattatctcgggggagaaaattatgtcttttggggtggtcgtgagggataccaaacactcttgaacacagacatggaaagagagctcgatcatatggcaaaatttcttgaagctgctgctgcctacaagaagaagattggattcaatggaactctactgattgaacctaagcctcaagaacctaccaaacatcagtatgactgggatgctgcaacaacacttaacttcttgcgtaaatatgggctgcttgcagaattcaaacttaacattgagtgtaaccatgccacactctctggtcacagctgccatcatgatcttgagactgcaagaatcaatggaatgttaggaaatattgatgcaaa

SEQ ID NO: 1101 - DNA, 374 bp, Gossypium hirsutum
  Clone ID: LIB3493-056-P1-M1-E4
tcagtctctatgctggggatcgtctgcttttggtggtattgtgagctcctattttagtggttcgctagtggatgcttatggtgtaaggtttgtttttggtatcactgcattgctaccgatgataacatctgctgttgctgttcttgtaaaagaacagcatgtgcctggcccaacaagagggcaaaatgttcttttagccaaccctagctttcttgaaagctcaagagagaatattattcagttgtggaatgctgtaagagaacccaatgtgtttcttcccaccgtttttattttcttgtggcaagcaacaccgcagtcagactccgccgttttttacttcaccacaaataaacttggtttcaccccagaatttc

SEQ ID NO: 1102 - DNA, 375 bp, Gossypium hirsutum
  Clone ID: LIB3493-056-P1-M1-E5
cggacgcgtgggtgcattttcagccgaaaaattcaaaaaaaaaaaattctaaataagtgatggggtttccggcaaatggctcatcggacaaaccattgaagttcctgatctacggtcgaaccggttggatcggtggtttgttaggcaaactctgcgaatcccagggaatcgattacgagtacggctccggccgtttggagaaccggatttcacttgagtccgacatagccaacgtgaaaccgacccatgtattcaatgccgccggtgtcaccggtcgtccgaacgtcgattggtgcgaatcccataaggtcgagaccatcagaaccaatgtggtcgggacccttaccctcgctgacgtttgcagagacaaaggcc

SEQ ID NO: 1103 - DNA, 373 bp, Gossypium hirsutum
  Clone ID: LIB3493-056-P1-M1-E6
ccgggaccggtgattccaaggggtggtacctgaagatgaagggagattaccataggtacttggctgagttcaagactggcgatgacaggaaagcggctgccgagaatacgctcactgcgtataaatctgctcaggacattgcgaatgccgagctggccccaactcatcctattcgattaggattggctctcaacttttctgtcttctactatgagatcttgaactctcctgatcgtgcttgcactctcgcaaaacaggcttttgatgaagccattgccgagcttgatacacttggagaggattcatacaaggacagcactttgataatgcaacttcttcgtgataacctcactttgtggacctcagacatgca

SEQ ID NO: 1104 - DNA, 368 bp, Gossypium hirsutum
  Clone ID: LIB3493-056-P1-M1-E7
ccgggaccggtgattccaaggtcttttacctgaagatgaagggagattaccataggtacttggctgagttcaagactggcgatgacaggaaagcggctgccgagaatacgctcactgcgtataaatctgctcaggacattgcgaatgccgagctggccccaactcatcctattcgattaggattggctctcaacttttctgtcttctactatgagatcttgaactctcctgatcgtgcttgcactctcgcaaaacaggcttttgatgaagccattgccgagcttgatacacttggagaggattcatacaaggacagcactttgataatgcaacttcttcgtgataacctcactttgtggacctcagac

SEQ ID NO: 1105 - DNA, 367 bp, Gossypium hirsutum
  Clone ID: LIB3493-056-P1-M1-E8
cttttagcttacagcttcgatggtttttcagtagtgaagagctaaaaaagaagggaaaccaatggaggggaaagaagaagatgttagattgggagcgaacaagttctcagagaggcaacctattgggacagcagcccagtcccaagatgataaggattacactgagccacccccagcacccttgtttgagcccagtgagttgacttcatggtcgttttaccgagctggaatcgctgagttcgttgctactttcctattcttgtacatctcggtgttgactgtgatgggagtccttaaggacaaaaccaagtgtacaactgttgggattcaagggattgcttgggcttttggtggaatgatctttgct

SEQ ID NO: 1106 - DNA, 370 bp, Gossypium hirsutum
  Clone ID: LIB3493-056-P1-M1-E9
gaaaatgcacaatctactaaggggaattctgatggtccacaagtgctcggccatgttgctctaccgaagtcatcaagcttctttgctgaatttgaaatggacaatggttttcagaagaaatcaagctcaaattcctcgaaagtgcaagaagttattcaggaaaccgatgaagctaggaaaaagttctcaaatgcaaaatctatttcctcggcccaatattttggcgatcagaccagagcagcagatggtgatgctcaagttacattgcagaaattctcaggttcgacagccatatccagcgctgatctatttggtcatggtatagataaatctcttgacctcaccgctagtgacctcatcgatcgactct

SEQ ID NO: 1107 - DNA, 369 bp, Gossypium hirsutum
  Clone ID: LIB3493-056-P1-M1-F1
gcgtcttgcagcccagagaaacacaagatactacaggggtatttggcatgcctttcataccatttgcagagaagagggaattttcggcttgtataaaggacttggagcaacattattgggtgttggaccaagtatagctataagcttttcagtatatgaatctttgagatcttattggcaattacaaaggcctgatgattccactattatggttagtcttgcttgtggcagcctctcaggcattgcatcatcaacagctacgtttcctattgatctcgtgaggagacgcatgcaactggaaggggctgtagggcgagctcgtgtttacaaaactgggttgactgggactttcaggcatataattcattc

SEQ ID NO: 1108 - DNA, 349 bp, Gossypium hirsutum
  Clone ID: LIB3493-056-P1-M1-F10
cttgctcttatagttgtccttgctttagcgtttggtcatgatacttgggctggtttcttcagtgacagtgcttcaatcattaaagactttgctacaatgaccccatttcttgcaatctccatagcagttgattcatttcaaagtgtcttatcaggggtggcaagaggtattggttggcagcacatggttgtagttgttaacttggcatcttattatgttgttggcatgccgattgcagctattgctggtttcaagtttaagctgtatgctaaaggtctatggataggctttatatgtggattgctaatccaagctgccattctactggtgataacatttcataggagat

SEQ ID NO: 1109 - DNA, 373 bp, Gossypium hirsutum
  Clone ID: LIB3493-056-P1-M1-F11
ggccggctaagtctggatgagaaagcatctcagagcatctctgccaaagtgatttctcctgtccatgcgaagaagtcacagaggaaatcacttcccaaactgccttctcagaagacaagtttgtccggtgcaaaaaatgaggaacagaaatccaaggagtctgatcaggaaacgacaactaaaccgaaagcaacatctaaagtaacaagggaggagagtaccgcatcatcttatttgaaaaatgaagaatcatctccaattcaacaactggaggcattttccggagctaattcagggtgaagtcagcctgacttagatctagggccagtgattggagacttggaacaagagccaattgcggtggagcattaag

SEQ ID NO: 1110 - DNA, 365 bp, Gossypium hirsutum
  Clone ID: LIB3493-056-P1-M1-F12
cccacgcgtccgaaacaattgggtttttacctatctgaagtctgaacctttgctccttttcttagtttcccttggtttttgttaaatctcgatactttgttcgaatctaccaccacccattggttcacttatccttgaaccacttccattacaggaattttcttcaagtgttgtttatcatggaaggagagacttcttggaacagccattgcgctgatgacatgtctaaagacatcggtgagtttgattcattctcggaacttagtgatgaaggtaataaagaaacgatcatttctgtagactcgatcctacccgatgacttgttggaacgaattttggcttatcttcccattgctagcattttc

SEQ ID NO: 1111 - DNA, 375 bp, Gossypium hirsutum
  Clone ID: LIB3493-056-P1-M1-F2
cggacgcgtggggcaaaatgttggggttcgttcatctttacaatggccaagaagctgtttcaactggtttcattaagctcttaaagcagcaagattccgtcgtcagtacttaccgtgatcacgtgcacgccttaagcaaaggcgtctctgcacgtgctgtcatgagtgagctcttcggtaagaccaccggctgctgccgtggccaaggtggatcgatgcatatgttctcgagggagcacaatgtgctcggggggtttgcatttattggtgaagggatccctgttgccaccggtgcggcttttacctctaagtataagagggaggttttgaaagaagtggattgcgatcacgtcactttggccttttttggggatg

SEQ ID NO: 1112 - DNA, 372 bp, Gossypium hirsutum
  Clone ID: LIB3493-056-P1-M1-F3
cttaaatcagaatgaatttcatgggtgcaaagcaacccgaaaatagcttgctcagtcctgaatctgactctcaaaggactctgtacccctatgtgactggaacatctgttgtggctttaaagtataaagatgggattttgatggctgctgatatgggaggttcttatgggtctacactgcggtacaagagtgtggagcgaatgaagcctattggcaagcattctcttctgggtgcaagtggagaaatcagtgatttccaagagattttgcgttatcttgatgagcttatcttgtatgacaatatgtgggatgatggcaactctttggggcctaaagaggtgcacaattacttgactcgagtcatgtataaca

SEQ ID NO: 1113 - DNA, 91 bp, Gossypium hirsutum
  Clone ID: LIB3493-056-P1-M1-F4
ctgctttagtattgcagtaaatagggggttgatctgagtctgatgtttaccttccaatagtggtttcagctgcttgatgcctacatttatt

SEQ ID NO: 1114 - DNA, 374 bp, Gossypium hirsutum
  Clone ID: LIB3493-056-P1-M1-F5
gaaggaaaggattctggattggcaggagtcactacgttggcatcatcattggactatatgtcttctagatcgtcactcaaactgcttttacccttgggaagtgttattgaagcgaaattgcttaagcattgtttctctgtgaagtgttattatctgcttgtatatatattggcaataatctgatgttatttctcttcggtgagtaggcagacctgcacgggtcctaaatgttcctgttattccaattggaacattgcttgctgctacccatccttttgcagctaaccctccctacctcctgtcttggttgagtcctcaaatttctaccccggacatgttgcagccaaagttgtttgaaaagcttgttacgaaaa

SEQ ID NO: 1115 - DNA, 373 bp, Gossypium hirsutum
  Clone ID: LIB3493-056-P1-M1-F6
cccatggctgctcccaaggttcgatttcttacaaagatatatcatcctaacattgataagcttgggagaatatgccttgatattctcaaggacaaatggagtccagctctgcagatccgaactgtacttttaagcatccaggcactcttgagtgctccaaatccagatgatccactctccgagaatattgctaagcactggaaatcaaacgaggctgaagctgttgagacagcaaaggaatggacgcgtttatatgcaagcggtgcatgaagaccggtggaaccgtttgctctcataaaataacatttttatgcaatgtaagctattcaatgtcaatttcatatggaaatctggacgaatgacagtttgaaac

SEQ ID NO: 1116 - DNA, 372 bp, Gossypium hirsutum
  Clone ID: LIB3493-056-P1-M1-F7
cccatggctgctcccaaggttcgatttcttacaaagatatatcatcctaacattgataagcttgggagaatatgccttgatattctcaaggacaaatggagtccagctctgcagatccgaactgtacttttaagcatccaggcactcttgagtgctccaaatccagatgatccactctccgagaatattgctaagcactggaaatcaaacgaggctgaagctgttgagacagcaaaggaatggacgcgtttatatgcaagcggtgcatgaagaccggtggaaccgtttgctctcataaaataacatttttatgcaatgtaagctattcaatgtcaatttcatatggaaatctggacgaatgacagtttgaaa

SEQ ID NO: 1117 - DNA, 371 bp, Gossypium hirsutum
  Clone ID: LIB3493-056-P1-M1-F8
cttatgtttgtggcgaagaagggtaccgacaagatgaggaatcacaaagagctaagtactcgagggacagattgaatcagctcttaaagatggtggagtcaaggatgcacacaaggactgccatctttgatgaacttcacaagctcatgttacaactagacttgatggtggacttttctgaattctcatgcttctatgattttgttttcttcatgtgccgagaaaatggtcaaaagaatattagtaagttatctcatgctagttcgttaaatgcaaatgcttgtactgatttatccttggaataacaacgaagttatctaagtgtaaattataaggaatttctttggtgtcgtatttaattctctttcttt

SEQ ID NO: 1118 - DNA, 367 bp, Gossypium hirsutum
  unsure (1)..(367): unsure at all n locations; Clone ID: LIB3493-056-P1-M1-F9
cggacgcgtgggtttgcatggagctgagaaggaaactgatccactcgactggggtgctcgaatgaagattgcgcttggtgcagctcgaggtttagcttatttacatgaagactccagcccccgtgttatacaccgagacttcaagtccagcaacatcttgctggaacatgattttacaccaaaagtttcggattttggattggctagaaccgcaatagatgaagggaacaaatacatctcaacacatgtgatgggaacctttggttacttggctccggagtatgcaatgaccggtcaccttcttgtcaaaagtgacgtttatagttatggggtggntctacttgagctcttaacagggaggaaacct

SEQ ID NO: 1119 - DNA, 274 bp, Gossypium hirsutum
  Clone ID: LIB3493-056-P1-M1-G1
ctttggaatatggagtctctaaaatggattataatcctctcatggttggactcactcttattcatactgctggtgctaaaagagctgtgtgtctggatggaaccttaccggggtatcattggcaccgtggatatggatcaggagcaaatagctggctcgttcaattggagggaggaggatggtgcaacaacattagaacttgtgtgtaccgcaaaaagaccagacgcggatcgtctacttacatggaaaagcagataccatttactggaatatt

SEQ ID NO: 1120 - DNA, 367 bp, Gossypium hirsutum
  Clone ID: LIB3493-056-P1-M1-G10
ctttctttctttcttcttcttgttcttcttcttcttgccttttccaaaccataaccatttttctacaccatatatacttatttttccttctgcatttccatatcttgggggtattattttggaacttactgaatattttagaacaattcttggtttttggtcattagggtgttattattactttaaatcccccacaagatgtctagcagaaggtcgagacagtcaacagcaggtgtttcgaggatttcagatgatcaaatcattgaacttgtatcaaagttacaacagcttctgcctgagattcgtgataggcgatctgataaggtaaacatttcatggaattcatgtttcttcttttgattcatct

SEQ ID NO: 1121 - DNA, 363 bp, Gossypium hirsutum
  Clone ID: LIB3493-056-P1-M1-G11
ctttttcttacgacaccgcaagataatcaaagccccttctttatcttctcttaccccaaatttcccttacaattagggttcttctctcgcgacaacttactcaaaaactgaaaacaatttttctgggatcttgtctctccagctttttctttttcccttgtttttctcttttgggtcaatttggaatttagaaatctaaaaaaaattcattgggttttttttttggaataatagaaatgcagtgtttgaaaccaggaccggagttaaccaccaccaatgtcgttacgatcaacgtcggcggcgaaaattttcagacgaccaaacagacgttaacacaagcgggaccgaattctctcctttctc

SEQ ID NO: 1122 - DNA, 355 bp, Gossypium hirsutum
  unsure (1)..(355): unsure at all n locations; Clone ID: LIB3493-056-P1-M1-G12
tagaggtctggtctactcaacagtttctcctccctcttagcaaccaaagactcagatccgctcggatttccttgtcccagaactagaatggagacctttctattcacatcagagtctgtaaacgagggacaccccgacaagctttgcgaccaggtctctgatgctgtgctcgatgcctgcctagcccaggaccctgacagcaaggttgcctgtgaaacatgcaccaagactaacatggtcatggtctttggagagattaccaccaaagccaacgtagactatgagaagattgttcgtgatacatgccgctccattggattntgttctgatgatgttggtcttgatgctgacaatt

SEQ ID NO: 1123 - DNA, 375 bp, Gossypium hirsutum
  Clone ID: LIB3493-056-P1-M1-G2
gaggtttcctgctcaggtgagaatgcgtataaggaaggtatgccaggcattggaagaggatgcttttaggccagtcttgcaccactatgacggtcccaagttccgtctcgagctctcagttcctgagactttggatctaatggacctttgtgaacaagcaggctccccataaacaaaatgctagccgagtgcaaatgtagtagcagtagggtttgtgatgcacgtttccggagatttttccatagagcgcaagctgtggtgggtgttaaatccagttggggaaaaagtaggaaatggcattagccacatatgaataaatgcgttcatgtcatgtgaaagatgcattgtaaaacttttgcattaatatgctatgaa

SEQ ID NO: 1124 - DNA, 372 bp, Gossypium hirsutum
  Clone ID: LIB3493-056-P1-M1-G3
atttccggctcaagaagaatgggtgatgcttctgaagttggagatgatatgagtgacagagtttatactattgattctatccatactggggttccatataagggagcccctgagcccaaacctggagttggagattgtcttgattatgcatacactccaagggatgtacttaatctgcctgatggatgtgatcccaatatcaagaagctctatacaaggcttcaggcccttgaggctgatagggaatcaatgagacaagcaataatatcaatgcgaactgacaatgcacagttggtattattgaaagaaatagctcaacagttgtgcaaggaaatgccccctgaaagacaattgaccgtgaggaagccatct

SEQ ID NO: 1125 - DNA, 361 bp, Gossypium hirsutum
  Clone ID: LIB3493-056-P1-M1-G4
tcgacatcgggcaaacgttgaaacggacatgaatacattgggatggtgagaagagaagtactggacgcttacttgagagacagagctaaggagaatggagctaacgttataaatgggctgttcttaaagatggatatgcctaaacattgggatgaaccctatgttttgcattacaccgagtatgatgggaagaaaggagctatgggagccaaagccactttggaagtcgatgctgtgattggagctgatggcgctaactctcgtgttgctaaagccattaatgctggcgattatgattacgccattgcatttcaggagagaatcaaaatccctgatgacaaaatggtttactacgagaatc

SEQ ID NO: 1126 - DNA, 132 bp, Gossypium hirsutum
  Clone ID: LIB3493-056-P1-M1-G5
tgaacctccatctattttggagatgggctttcttcatgctgcgtttatcaaaccataaccatttctctacaccatatatacttattttttcttctgcatttacatatcttgggggtattattttggaactta

SEQ ID NO: 1127 - DNA, 357 bp, Gossypium hirsutum
  Clone ID: LIB3493-056-P1-M1-G6
cccacgcgtccgattatccttggcattcatagttccattccattttccctaacaaatttatttagatctgatcagatttaactcagatccttttgtatcgagtcttctaagttccagatctttacttattttgaccttaggcagaaagaaaaagaagagatgagagagattattagcgtccacattggtcaagctgggattcaagtcgggaattcatgctgggagctttactgtcttgaacatgaaattcatcctgatggaatcatgcccagtgacacctcagtcggtgtagcacacgatgctttcaacactttcttcagcgaaacgggttcaagaaagcatgtaccgagagctgtc

SEQ ID NO: 1128 - DNA, 369 bp, Gossypium hirsutum
  Clone ID: LIB3493-056-P1-M1-G7
cccacgcgtccgattatccttggcattcatagttccattccattttccctaacaaatttatttagatctgatcagatttaactcagatccttttgtatcgagtcttctaagttccagatctttacttattttgaccttaggcagaaagaaaaagaagagatgagagagattattagcgtccacattggtcaagctgggattcaagtcgggaattcatgctgggagctttactgtcttgaacatgaaattcatcctgatggaatcatgcccagtgacacctcagtcggtgtagcacacgatgctttcaacactttcttcagcgaaacgggttcaggaaagcatgtaccgagagctgtcttttgtgatctg

SEQ ID NO: 1129 - DNA, 363 bp, Gossypium hirsutum
  unsure (1)..(363): unsure at all n locations; Clone ID: LIB3493-056-P1-M1-G8
tcatcggtttcagttcagctggtgcgtattatatagtcaactactatggcaaccagaatgtctgttagatacgtttctcgtaggttctcgagtgggagtgggaagatactcagtgaggaagaaaaggctgctgaaaatatttacatccagaaaactgagcgagagaaattggagaaacttgcacgcaagggacccaagccagaggagaaaccggatgctggttcagggggtgctgcgaccgatggtagcactacctctacatcgggaacatctgctgagaaagtatcaaccgataagtaccgaaactacggngttcttgctggtgttgcaacccttggtgctgctgtgggatggtatctcaac

SEQ ID NO: 1130 - DNA, 363 bp, Gossypium hirsutum
  Clone ID: LIB3493-056-P1-M1-G9
ggaatggggtgcagtgcaggccttatatcagtcgagctagctaaaaacctccttcaagccaatcccaacacgtatgccgtagtggtaagcacggaaaacataacactgaattggtatttcggcaatgacaggtccatgttgctatgcaactgcatattccgcatgggtggagccgctgtgctcttgtcgaacaaggctggagacaaaagtcgttccaagtaccagctggttcacttggttcgaacccataaaggtgcggacgacaaacattacaactgcgtctaccaaagagaggatgagaaaggaaccggtggggtttctttggctcgtgaactaatggcttgagctggagacgcattgaaa

SEQ ID NO: 1131 - DNA, 375 bp, Gossypium hirsutum
  Clone ID: LIB3493-056-P1-M1-H1
gctaaatcctttttggatgatgatagagaataatagtaatagtaataataataatgtgcagtaccagtttgagtctgatggaccaccaaaatcaaagctgcctcagagtcagaggccaacaccagaaatgtaccataatacgtaccagtcagatgataggcatcacaaaacaagcaatcccacattgcagaagggcataggtgcaattacatcatcccttaattacattggtaatgctgttgaggagggtcttacaattgtggagaaccggactgcaggcatcattcaagaaacccgcatacatatcaagaaaaagtctagtggttctgtggcacaaaatgagcatgctaaacagccacaaattgagcagcaagt

SEQ ID NO: 1132 - DNA, 94 bp, Gossypium hirsutum
  Clone ID: LIB3493-056-P1-M1-H10
ctttcatctaaccttggttttctctactgtaagtatgtttcctttttaaactatttgatttatttgcagatctgggttttgtttatttatggat

SEQ ID NO: 1133 - DNA, 370 bp, Gossypium hirsutum
  Clone ID: LIB3493-056-P1-M1-H11
gtcgggttccggtgatgccaagaccccaggccttagctacacaccgttttacaggaaccaagtggcttcaaacccagttttcaaagagttctactacgtaactctacgtaaaattctggtgggcgataagcacgtcaaagttccgtacagttatttggtcccaggatcagacggtaactgtggcaccatcgtggactcgggatcaacattcacttttatggagagaccaatgttcgaggtagtctcgaaagagttttagaaacaaatgggaaattttagaagagtgcgtgaaatagaaaaccgatccggtttagccccatgctttaacacttcgggctatacttcaatagaaatccccgaattgagtttc

SEQ ID NO: 1134 - DNA, 370 bp, Gossypium hirsutum
  Clone ID: LIB3493-056-P1-M1-H12
gggaatgcttactgggcctgtggccatccttaactggtcctttgtcagaaatgatcagccccggtttgagacttgctaccagattgccttggccatcaaggatgaagtggaggatcttgagaaggccggtatcaatgttatccaaattgacgaggctgctttgagagaggggttgcctcttagaaagtcggagcacgccttctacttgaaatgggctgtccactccttcagaatcaccaactgtggtgtacaggacactacccagatccacactcatatgtgctactccaacttcaatgacatcatccactcaattatcgacatggatgctgatgtgataaccatcgagaactcacgttcagatgaaaag

SEQ ID NO: 1135 - DNA, 312 bp, Gossypium hirsutum
  Clone ID: LIB3493-056-P1-M1-H2
tcctttctcccttctcttaagagtagaatgattattggaaggttacgccaatggttaagtctactggtctgtgtgcttgcagttatactactcaaatctgaaggcgctagtgtagggattacttatctgcaggatgccgtagcgaaaggagctgtttgtttggatgggagtccaccagcttaccattttgacaagggctctggcgctggagttgataattggattgttcacatggagggtggaggatggtgtgaagatgtgccgacttgcctttctcgtaagaacaccgatttagggtcatcaaagcaaatg

SEQ ID NO: 1136 - DNA, 369 bp, Gossypium hirsutum
  Clone ID: LIB3493-056-P1-M1-H3
cattaatgatgtactaaaggaattgggtgaatggctgtgcacacagctgaagaagccttcccatcctacttgtggtattccaactgctattaactgccttgcatcattactgaaggaacctgtcgtcagatcttcctttgttcaagcagatggggtgaagttactgattcctttaattactccggcatctacccagcaatctatccagcttctctatgaaacatgcctctgcgtgtggctgttatcttattatgagccagcaatcgagtatttagcaacatctagggctcttccaagactggttgatgttgttaggagttccacaaaggagaaggttgtcagggttgttgtattgacctttaagaactt

SEQ ID NO: 1137 - DNA, 371 bp, Gossypium hirsutum
  Clone ID: LIB3493-056-P1-M1-H4
gtgaacttgttaaagaagcaagcggggttaaacaaaccctatggagctatatgtgcatctccagctttggtgctggagcctcatggtttactcaagggcaaaaaggccacagcttaccctgcaatgtgcgacaagctatcagatcaaagtcatattgacaacagagtagtggtggatggcaacctcattacaagcaggggacctggaactgccatggagtttgcactaggaattgtggagaagtttttcgggcgcccgaaagccttagagctagcaaaaagactgcttgttggacgccagtagatgaactagtatgagtgtttggtcctgcccatgttaccctatagcctgctatgagacgatatatgaga

SEQ ID NO: 1138 - DNA, 374 bp, Gossypium hirsutum
  Clone ID: LIB3493-056-P1-M1-H5
cggacgcgtgggtttttccagagatgtgttcttttcgcttctttcgttatggggaagatcaagatcggaatcaacggatttggaaggatcgggcgtttggttgccagagttgctctccaaagtgaagatgttgagctcgttgctgataacgatcctttcatcaccaccgattacatgacctacatgtttaagtatgacagtgttcacgggcaatggaagcaccatgagcttaaggtgaaggactcaaaaacccttctctttggtgaaaagcctgtcactgttttcggcatcagaaaccctgaagaaatccctttgggtgagactggagctgattatgtccgtgagtctactggtgttttcactgacaaggacaa

SEQ ID NO: 1139 - DNA, 378 bp, Gossypium hirsutum
  unsure (1)..(378): unsure at all n locations; Clone ID: LIB3493-056-P1-M1-H6
ggaaaaagaaaatcaaaaccccaaggtgaagaaggtgaaaaccagcagcggcaaaggcaataaaaggtgaagccaaagagagagagatatatacataataaaaaagactnttcaaaagaacacaactatggctcctcatagagaaggatcagatgcttcagtggaagccatggttgctcaagtcgaaaaacacccaatttcatcgatccttatcatcattgctatgcaaacagaagctttgccggtggtgaataagttccagttgattgaaaaccctcattcttcgtttccaaaaggggtcccttggatccattatcatggtgcatacaaggacatcataatcaatctagtttggcctggaaaagatttaacctttgg

SEQ ID NO: 1140 - DNA, 373 bp, Gossypium hirsutum
  Clone ID: LIB3493-056-P1-M1-H7
ggaaaaagaaaatcaaaaccccaaggtgaagaaggtgaaaaccagcagcggcaaaggcaataaaaggtgaagccaaagagagagagatatatacataataaaaaagacttttcaaaagaacacaactatggctcctcatagagaaggatcagatgcttcagtggaagccatggttgctcaagtcgaaaaacacccaatttcatcgatccttatcatcattgctatgcaaacagaagctttgccggtggtgaataagttccagttgattgaaaaccctcattcttcgttttcaaaaggggtcccttggatccattatcatggtgcatacaaggacatcataatcaatctagtttggcctggaaaagatttaacc

SEQ ID NO: 1141 - DNA, 370 bp, Gossypium hirsutum
  Clone ID: LIB3493-056-P1-M1-H8
cccacgcgtccgatttatctcaggccttatgtctttacctgtaaaactacccggaactcaactttatcgatcattgcaggcaaagaagagaatggttaagattgtacacaaaatcatccaatctaaaagggattcaagcatgagttcaatggttccaaaagatgtggttgatgttttgctcaaggacgctagtgaactattaaccgacgatctaatagcagataacatgattgatatgatgatccctggtgaagattcagtgcctgttttaatgactctcgccatcaaatacctttccgattgtcccgctgcgttacatcaattgaccgaggagaacctgaagttgaaaaggttgaaagctcaaaatgga

SEQ ID NO: 1142 - DNA, 370 bp, Gossypium hirsutum
  Clone ID: LIB3493-056-P1-M1-H9
acaatatcccactagagtgtgtgcgactcctaagatgaacaacctgcaattacaacatttcatggtctcatccctgacatccctgttatcgatttcaaccaccctgatcaggatcatatcatccatttgattgccaacgctagcagggattgggggatattccaggttgtgaaccacgggataccctttcatctaattcaaaaactgcaacaagttggaaaggagttctttgatctccctcaggaagagaaagaagtgtatgctaagccacccggtgcactcacccttgaaggctatggaagcaagatcgggaaagatgttaatggaaagaagaactgggctgatcacctttttcataagatatggcctg

SEQ ID NO: 1143 - DNA, 391 bp, Gossypium hirsutum
  Clone ID: LIB3493-057-P1-M1-A1
ggagaactggatctggaatggggacgctgttgatatcgaagataacggaagaatacccagataggatgatgttgaccttctctgttttcccatctcctaaggtctctgataccgtcgtggagccttacaatgctactttgtcagttcatcagttggttgaaaacgctgatgagtgtatggtcctcgataatgaggccttgtatgatatttgtttcaggacacttaagctcaccactcccagctttggtgatctgaatcacctgatatctgcaacaatgtctggggttacatgctgcttacgattccctggtcagctcaactctgatctgaggaaacttgctgtgaatctcatcccatttcctcggcttcatttcttcatggtgggttttgg

SEQ ID NO: 1144 - DNA, 355 bp, Gossypium hirsutum
  unsure (1)..(355): unsure at all n locations; Clone ID: LIB3493-057-P1-M1-A10
cgtnccgctaatagctntggctgatggatacgagctactggcacataggtttggctgctgaaattattggcacatttgtgcttgtttacactgtattctctgcaactgatcccaaaagaaacgcaagagattctcatgttcctgtgttggcaccacttcccattgggtttgctgtgtttatggttcatttggcaactattccgatcaccggaaccggagtcaaccctgctcgtagtttcggagctgttgttatgttcaaccaggacaagccatgggatgatcattgggtattctgggttggaccattcattggagctgccattgctgcaatttatcaccagtatatcctcagagc

SEQ ID NO: 1145 - DNA, 303 bp, Gossypium hirsutum
  Clone ID: LIB3493-057-P1-M1-A11
cctcctcggaccccttggtttaccgagtgccttcttaaacaagggggaattatcaaagaaacatggattgaagaaaatcctatagaaactatacttaagtactctcatgttgcagcaaaagacccaaattttattgctcctgcatatgctgaaacccacccagaacctgtttttgcaaagtcagattcttaggattaagagaaatgatccgattgtgctcatatgtacgatctctatattaccaagttaatatagcttcctaccgaactcattgaatttaactggctttctggaaagatggat

SEQ ID NO: 1146 - DNA, 214 bp, Gossypium hirsutum
  unsure (1)..(214): unsure at all n locations; Clone ID: LIB3493-057-P1-M1-A12
ctttaatggcatccaagcggcntgggtgcaccaaatgtttgcataaaattatagattactgttcaaattttcttattctgtttcaataatctctgttttaagaaggggtggcggctattattgtttctaaatcattggccaaatcaaaaagagctcattcacaacaccatatctaaaagcctcattccgtccaaaaatccaaactcccatcacc

SEQ ID NO: 1147 - DNA, 317 bp, Gossypium hirsutum
  unsure (1)..(317): unsure at all n locations; Clone ID: LIB3493-057-P1-M1-A2
tcttcctgcctatactgcccaanaaatggggaaagtttcttataaacatcttccatcaatcttcccctataacccaacttcnttctatctcctaaaaccanccaancacttcaagttgcaccagagagcccctctttttttctcttaagccaaccatcttcatgctttcaacgaaactctttagtctaacttaaatgatgaggaaaaactgaagaagctcggctatcttattaatcatagccaccacagctttggtgttctctatgaatccagcttccctgacttttatgaactattcaaactattcccaaacaatt

SEQ ID NO: 1148 - DNA, 391 bp, Gossypium hirsutum
  unsure (1)..(391): unsure at all n locations; Clone ID: LIB3493-057-P1-M1-A3
aaccagtaccaaatttctctcgacaatgctaaaccttgtgaatggcttccagtactatcgcattctgttactgcgtatcaacaacagctttggggttgagcagcctcaagcgaagccccactgtttgtgtctctaccattatttttccaaagcctcgccgctcgtcggctatggtagtcagagctgagggtcaaaccataaacccagagataaggaaaacggaagagaaggtggtcgactcagttgtagtcactgaactctctaagccccttacagcttattgcagatgttggaggtcaggtactttccctctntgcgatggaggacatgtgaaacacaacaaggctacaggggacaatgttggtcctttgctcttgaagaaacagtaacc

SEQ ID NO: 1149 - DNA, 349 bp, Gossypium hirsutum
  Clone ID: LIB3493-057-P1-M1-A4
tcggagagcgttctggaaactcagcggggatcaataaccaccaagggaatcacatgttacaattgcaaccattgacaattcataaagctggtgataccggttttcttcgtttgctttcactgatagctcatttttcatcttcttcgtctctaaaccgaagctcgtcgcggtttaatctggaagaaggcgtcaagacagcaacctttaagttacatttatgttggaaataaacactatatagaaaccaattttcatgttttaatgttttcactgacatatctggttttggttttggttttggtttggattggaagggcattttaaaattcaacccaaaaacacttttttt

SEQ ID NO: 1150 - DNA, 277 bp, Gossypium hirsutum
  Clone ID: LIB3493-057-P1-M1-A5
gtccgcttgcaggagaaaccaaagccagtttcacaatgaccaaactcatctattggttgtccacgagagccaaatagccatttatgacagcaagcttgaatgtttacgctcgtggtctccaaaagagtcattaaatgctcccatttcgagtgcaatatattcttgcgatggctcactggtttatgccggtttttgtgacggcgccattggagtttttgattccgataacttgagactcagatgtcgaatagcaccttcggcttacataccttcgtta

SEQ ID NO: 1151 - DNA, 383 bp, Gossypium hirsutum
  Clone ID: LIB3493-057-P1-M1-A6
gcagctatccatttcctttgctggagagcttcccagtcctttaaagtttcattaaataaaccaattttaatgtcgtcgtcctcgctctctaatcccgctctctccactcctttcatctgccacaaccttcgtctaaatcagaatacgaaggatgggataaattgttttccctctcttagaaggcatagagtcccaagatgtgcagtggatatgccttacggaggtaatgctccaacttttcctcgaataagagtctgggatccgtataagcggctcggcattagtccttacgcttcagaggaagaaatttggtcctcgcgcaattttctcttagaacaatatgctggacatgagagaagtgaagaatcaattgaagcagcatt

SEQ ID NO: 1152 - DNA, 283 bp, Gossypium hirsutum
  Clone ID: LIB3493-057-P1-M1-A7
gattgctgctgacctcagagagcgtgttatcaagcctgttattcctgacaagtatcttgatgggaagactatcttccacctcaacccatctggccgctttgtcattggtgggcctcaccgtgattcaggtcttaccggtcgtaagaacatcattgacacttactgtggctggggagcccatggtggcggtgctttctctggaaaggacccaaccaaggtggacaggagtggagcttacatctttaggcaagctgtcaagagcattgtagctaatgggcttgca

SEQ ID NO: 1153 - DNA, 389 bp, Gossypium hirsutum
  Clone ID: LIB3493-057-P1-M1-A8
ggtttcaatggggtatcgcaaaaggcttagaatcgtctccggaattttaaaagacaagggttcatttgtcaaaacaactttatcaacaaagcgccacaaagcttccactcgtcgcgtcattctacgagccaccacccacggctcctctgttcccccatcagatcaccgaatcgcagccgttataggccttggtcatggctcacgtttcacagcatgcacttgtatacaagccgtcatggaccgtctacaccgcaccaaagattcatcggtcgctctcaaatgtctctacacaatccataacataataaacaaaggttccttcatcttgaaagatcagctcgcggtttacccttcttccggtggccggaattttctcaacttatcgacgt

SEQ ID NO: 1154 - DNA, 386 bp, Gossypium hirsutum
  Clone ID: LIB3493-057-P1-M1-A9
gcggacgcttgagcgaggacctgagcagctgcagcagtcccagcactttcttccctctcccatcgagctccaattccttccatttccttcctcttccccgactccagcagacccttttctctttcccgctcattccgctccttttccctcactccccaagccaaagcctcagacatcgaaatctcctttttcgacgacctcaaccccgaagacgaacctgtcgcctttgacccgccaacacccccagaagggttcatccctccacctgctttcgacgatggccccgaggaaaccgaggacgaagtcgccgctgcctatgaggagctctacggcccagcctacagtggggtctccgttctaggcaacgatgtttatgtaatggactc

SEQ ID NO: 1155 - DNA, 247 bp, Gossypium hirsutum
  Clone ID: LIB3493-057-P1-M1-B1
acctacgcaagggggtcgttttttaccgggggaggcgtgttgtgacattaaacttttcactaacccatcaaccattacaggtttcactactatatatcaagctcactcatcattggtactccaattaagctcgagcatcatcacctgccaacaacacactaataggcccctttctataggaagcttgaagctctaccttatagggatagggtcctatggaagcaatgcctggaccattttcagaacc

SEQ ID NO: 1156 - DNA, 274 bp, Gossypium hirsutum
  Clone ID: LIB3493-057-P1-M1-B12
cggactcaccacctcttttgcggggtgctacctggggcccaactttcattcactttaacatttaatgaattaatcttttgaacattaagtaccattttctggacttagaatggaaatttttttttttacatttttgatgtggcatgcccgatcccggcataactttttggcccggtttggggtgctaccgtaaaaaaaaatggttgtgggtctatgtttaatttgaaccgttccagggcccatttcaagcattttgtgggaaaaaagtgaaaaa

SEQ ID NO: 1157 - DNA, 303 bp, Gossypium hirsutum
  unsure (1)..(303): unsure at all n locations; Clone ID: LIB3493-057-P1-M1-B2
cggagataacgatccanctagtggcgaggggtagcagctgcaggagttcaagcancgattcttcgtcttcgagtgattcagattctgggagctcatccggaagtgattccggtgcagactatgcgcggtcttgaaggcatgagctattcgattttggggcaaatccagttggaaaattgggtggtggggatgtagatgagaggtatattttgctaacatctgctaacaaactgggaaaaaaattaggggtattagtaagtattaaatgctgaacatatgaacatttttttttccttctttttt

SEQ ID NO: 1158 - DNA, 362 bp, Gossypium hirsutum
  Clone ID: LIB3493-057-P1-M1-B3
tcttcctcgactcttgggctgactcttgggtgaggtgatacacccaaggtgggcaatgcttggtgcttcaaggttcatcatccctgaagcctttaacaaatttggtgccaactgggggcccgaagccgtttggttcaagaccggagctcttctcttggacgggaacactcttgaactacttcgggaagaacatccccatcaaccttgtggtggctgtcgttgcctaagttctccttgttggtggtgctgcatattacagaatcatcaatggcttggatctggaggacaagccttaccctgggggaccttttgacccactggggttaggccaggatccagacctggcttgttttctttaggtg

SEQ ID NO: 1159 - DNA, 112 bp, Gossypium hirsutum
  unsure (1)..(112): unsure at all n locations; Clone ID: LIB3493-057-P1-M1-B4
cggacgcgtgggcaaaacttgggcnaggttcttatgtgggctcagagcattcnnattctgattttccattactaggcatgagataacttggagaagccaactccaaagaaac

SEQ ID NO: 1160 - DNA, 382 bp, Gossypium hirsutum
  Clone ID: LIB3493-057-P1-M1-B5
gccgggtttattttttatttttggggaggggtaccaaccatggccaatattccaatatgaatttcgcagagttgaggatgtatccatatccgatactagaacactcccttaagggtccctttggtaacatgaatttgaaaattcggatttgactttcatttattatgaaatgcatgcattacagacaaattagctgtgattcaatataatacgtatttgaaaaggataagaacacgaatttatcatcatagatttgagaaataactactcaatttactttatttttgaaatccaagttcccaaaagctacctaataaaaggtttcttttttcatagattctaacctaaattctccggaatattgagttctcctaaaatttat

SEQ ID NO: 1161 - DNA, 272 bp, Gossypium hirsutum
  unsure (1)..(272): unsure at all n locations; Clone ID: LIB3493-057-P1-M1-B6
ctttttgcagtgtgtttatttatgagggtgttagttctcggtttcatcgganaacaaaagtcaaaaaacaaaaatttcatggctcggaaattctttgtcggtggcaactgggaatgcaatgggacaactgacgagggtaaaaagatcattacaacattgaatggagctgaaggtccttctcaggatgtgtgtggagggtggtggtagccccccatttggttcccttacctaagcgaaaagggtgctcctggctgacttccatggggctggtc

SEQ ID NO: 1162 - DNA, 386 bp, Gossypium hirsutum
  Clone ID: LIB3493-057-P1-M1-B7
gcgcgaaccctgattaatcggaggtggaattggcaggatcaactttgtaaaaacccgagaccaaatccagatataaaaactctctttgtggatcactcatgtgggcaggcaaatggtgcacgagcaccatcacctgccaataatacacttcttggatccttaccaaaagctggagggtttcctcccttaggggctcatgggccttttcaacctacgcctgcaccggttccagcaccccttgcaggttggatgtcaaatccttcagctgtaactcatccagcagtttcagctggggccattgggcttggtgcggcttcaataccagctgcggtgaagcatccaaggactccttcaactaatacggctgtagactacccatcttgaga

SEQ ID NO: 1163 - DNA, 376 bp, Gossypium hirsutum
  Clone ID: LIB3493-057-P1-M1-B8
tccgcggactcttgggctgaggcgtgggtttctgagagagatagaacagatcaacctgctagtttatatgctgctactaagaaagctggtgaagaaattgcacatactgataatcatatatacggtctctctttaaccggtttgaggtttttcaccgtttatggcccctggggaagaccagatatggcttatttctttttcactagggatatattgaaaggcaagtcaatatcaatattcgaggcagctaatcatggcacggtggccagggattttacctacatagatgatatagtgaaagggtgtttagcagcactggataccgcctagaagagtactggtagccggaggaagaagaaagggcccgctcaattga

SEQ ID NO: 1164 - DNA, 320 bp, Gossypium hirsutum
  unsure (1)..(320): unsure at all n locations; Clone ID: LIB3493-057-P1-M1-B9
ccctcccggaccctttggcaggggcatgggaacctggctctcaagcagcancccatgtcgcctaaatccccaagaggaaaggattgaaggaacagatgaccccactttccggggtcggggacaaactgtaagctaagagagagtaactgtgattgtgtggcataacctttgctgcaatttagttttgttttctgtctgggtatattttggtagcatggatgctttttcacccatatgatgtactttcctttttaaactcttgtgttttgatgatgatcatgatgtactacaatcgacattgcgttgaacttttttatacc

SEQ ID NO: 1165 - DNA, 368 bp, Gossypium hirsutum
  Clone ID: LIB3493-057-P1-M1-C1
ggaaattggattgcaaaagagggctcagtcctaaagacattgtcgagggctcaccaaatctcaatcttgcatttgtagctcaaatattccatcacaggaatggtttaactgacagcaaaacgacaacctttgctgagatgatgacggatgatgcagaaacgtctcgtgaagagagatgctttcgcttttggatgaacagtcttggagctactacatatgtcaacaatgtttttgaagatgttagaaacgggtatgttatgttggaaattgtggataaaatttttcctggaacagttaactggaagcaggcaaataagcctcctataaagatgccatttaaacaggttgagaattgcaatcaagtgata

SEQ ID NO: 1166 - DNA, 372 bp, Gossypium hirsutum
  Clone ID: LIB3493-057-P1-M1-C10
cggacaacataaagtacgggtggactttctccgactggacggctctcggttacgggtcttcatgtaacaacctggatgccaacgggaacgcatcttatgcatttagcatgtattaccaggtgcaaaatcagaaagacatggcgtgtaactttcaagggttggctataattacaacacagaatatttcacaaggggcttgcaattttatcattcagattgcttcttcatcatcttcttttacttcagtaagtcgcttaatgttaggattagccatttttataggattaacttcatatttactaatttaactgtgattatttagatatataagatatgtgctattcttttgcaccttatttctcttagattctt

SEQ ID NO: 1167 - DNA, 207 bp, Gossypium hirsutum
  Clone ID: LIB3493-057-P1-M1-C11
gtggaaacccatcctggggatggtgttcaaccatgacgaagcgattcactagcaaaaaccccaagctgctgaacaagaactctgccatacatagccacatgaaagagcgggggccaatgctgctggagaatccagcggctctatatgcgagcgaagaaactgccctaaagtgcaacaaagcggagaaaacaggagctctcgccgaga

SEQ ID NO: 1168 - DNA, 375 bp, Gossypium hirsutum
  Clone ID: LIB3493-057-P1-M1-C12
cttcagctctctcaacggggtgtgtccgcttacccacttgctctaatcctacgcacccttcccatttcaaagccccttccctccaattccctctccggtccctcactcctgctaacctcacccaccgttccaccggcctccgcgccacgggcgcccccgaaaaaatcgaaaaacttggcaccgaaatctccaacttaaccctcgaggaagcccgcacccttgttgactaccttcaagagaaactcggcgtctctgccggtgccttcgctcccgcagccgatacaattgccgcccccggtggtgcccatgcctaagcggctgttgttcaagagaagacccagttcgatgtggtgattgaggaggttcctagcaatg

SEQ ID NO: 1169 - DNA, 224 bp, Gossypium hirsutum
  Clone ID: LIB3493-057-P1-M1-C2
attatacttccttattggcaaaccaaactttccatcaacgggaacgctatctaccacttggggggggccttcacctttacccaatatactggcagccattgtgggcaggttagcaaagtcaagccaacctgccctcttaataaacgctcgcccattaagtcgagggtatggacaggtgttcggggcactatgaatagttctaaacccaaaaaggggcaaactgg

SEQ ID NO: 1170 - DNA, 387 bp, Gossypium hirsutum
  Clone ID: LIB3493-057-P1-M1-C3
cgaatctgaaacccccccctgggtatggggatcactctctaaaaccccagccaaactagtctttccaaacccaatggattctgtgtttgcctccattgttcaagctcctggagatcccattcttggggtgacagttgcttataacaaggatccaagcccaaacaagttgaatttaggtgttggtgcttacagaactgaggaaggaaaacctctagttctaaatgttgttcgaaaagcagaacagcttcttgttaatgaccagtcgagagtcaaggagtatcttcctattcttggtctcgcagagttcaataaattgagtgctaagctcattcttggtgatgacaggcctgctattcaagagaacagagtggctactgctcagtgctt

SEQ ID NO: 1171 - DNA, 248 bp, Gossypium hirsutum
  Clone ID: LIB3493-057-P1-M1-C4
tctaatgcagtgtgaattatgtcgggaggggcttacgctgggcattgtaccatgtataatcttatggtaatactgctagtgtggggtgtatcatccaagggtgtcccggggattattggaacactatgttttggcctatataatcagtaccgatacgaaattaacttcctcgatatcatcactatgaaaaaaaacacttgtaatttcaatgaatagtatgtaactggattaggttgcaattagattgt

SEQ ID NO: 1172 - DNA, 370 bp, Gossypium hirsutum
  Clone ID: LIB3493-057-P1-M1-C5
gggagtactgtctgtgactgtggggtggggtgaagatttggctattatagatttaatgggaaaggctgatccctatgttgtactcacaatgaagaaatcagagttgaaggataaaactagggttgtgaatgacagcttgaatcctgtatggaatcaaacttttgactttgttgttgaggacggattacatgatatgctaatccttgaagtctgggatcatgacacttttgggaaggattacatgggaagatgcattttgacattgacaagggttatattggaaggggaatacaaagattgcctgccgctagagggagctaaatctggaaaactgaatataaaccttaagtggatgccacagccgatattc

SEQ ID NO: 1173 - DNA, 376 bp, Gossypium hirsutum
  unsure (1)..(376): unsure at all n locations; Clone ID: LIB3493-057-P1-M1-C7
tctccgggaaatgacttttttgggtatgggtgtgtcaagtatgaaatcangcnaacgtgcattgttacatgtgggctgggaattaggttatgggaaagaaggaagcttttctttcccaaacgttccaccaatggcagacatattatatgagggtgagcttattggatttgacgaaaccaaagaaggaaaggctcgtgctgacatgactgtagaggaaagaattggtgcagcggatagaagaaagatggacgggaattctttattcaaggaggataagctagaggaggccatgcaacagtatgaaatggccatagcgtacatgggtgatgactttatgttccagttatttgggaaggatcgagacatggctttagct

SEQ ID NO: 1174 - DNA, 65 bp, Gossypium hirsutum
  Clone ID: LIB3493-057-P1-M1-C8
caactctaatactactcactataggaaactttactccttacaatacctgtcctgaattccctggt

SEQ ID NO: 1175 - DNA, 363 bp, Gossypium hirsutum
  unsure (1)..(363): unsure at all n locations; Clone ID: LIB3493-057-P1-M1-C9
tccgtggaggtgtantcatgggatcgcgagatggaaaaattgtgtttganaataccctggatgcacggttggatgttgcattcaataagaaacttccagagatcctcaagtggctttttggtcaggttgctgcttgaaggcttaagatggtattgtttttctcagcagcttttgtcatcggccatagagcatagtgattaagttatttgttccatgtatttgctttctcatattggtctccccgaatagtttatttgtttgataaaagtcagtgaaactcttggtcgattggtccgtatatcattttctgggattgtgaaagtactgtttttaaataatgaataaaatttgaaatgtttggtt

SEQ ID NO: 1176 - DNA, 385 bp, Gossypium hirsutum
  Clone ID: LIB3493-057-P1-M1-D1
gtcaccctgtctcccaaaccagtctcgggatgtggtgagcttagaccaaattttatgactatatataggggattgcaccaaggcagtgacactattaagggatcagtgagactgttttgtatacctgtagcatatagtaatagtaagcagtaatagcaatggcctcctccatgatctcatcggcaaccattgccaccgtgaaccgctcctccccggcacaggccaacatggtggcccccttcaccggcctcaaatctggctctgctttcccagtcaccaggaaggccaacaacgacatcacttctcttgcaagcaacggtgggagagtgcaatgcatgcaggtgtggccgcctcttgggaagaagaagttcgagactctctcata

SEQ ID NO: 1177 - DNA, 356 bp, Gossypium hirsutum
  Clone ID: LIB3493-057-P1-M1-D10
tgctttttagttataaagggcggggttactttttggtcgtgagatctggccattcatttataaatcgtaagtaaaaaaaagtctcagattttgggtattttgggttcttactaatacgagcagaagagatgtcctacgcttacctcttcaagtacattatcattggcgatactggagttggaaaatcatgtcttcttttgcaattcaccgacaaacggtttcagcctgttcatgatttaaccattggtgttgaatttggagccagaatgatcactattgagaacaagccaataaagcttcagatatgggataccgcaggccaagaatcattcagatctattacaagggcttactac

SEQ ID NO: 1178 - DNA, 375 bp, Gossypium hirsutum
  unsure (1)..(375): unsure at all n locations; Clone ID: LIB3493-057-P1-M1-D11
gacgatgtgggtctggaggctgcaactgcaaagtgctggttaacatanagcaacaaagccctgatattgcccaaggtgtccatggccatctcagtaagcgtcccgaggaaatcggtgctggtgaccagggccatatgtttggttacgccacagatgaaacccctgaattgatgcctttgacgcatgttttggcaaccaggcttggtgctcgcctcactgaagttcgcaagaacggaacttgcccttggcttangcctgatggcaagactcaagtcaccgtcgagtattacaacgataagggtgccatggggcctgttcgtgtccacaccgagctcatctccactcaacatgacgagaccgtgactaacgatgaga

SEQ ID NO: 1179 - DNA, 319 bp, Gossypium hirsutum
  Clone ID: LIB3493-057-P1-M1-D12
tgaaaatcatggtggagggaatgagaggcaatattgaagaagaaaaggaaggaaaggagaggaaagtgagggaaatggaggaagagatgaagaaaacggcgtcctttagaggcgagtgcgttgagaacttgaggaaggaaaacgagaagttgaaaatggtggtggaggaaatgagaggaaaagttgaaggatcaagggagatgaacagaacggcgttatttataggctaaaacgacgactttcactttttgttactaatgatgatagggttaattgaagtcagtgtgaaatcaaatctgattaagaatttgaagagaaa

SEQ ID NO: 1180 - DNA, 381 bp, Gossypium hirsutum
  Clone ID: LIB3493-057-P1-M1-D2
acgtgacctcagtgatgaacggcagcgttcactttctcgccgcggtgactgtttcttcacaggtaaggtgttcgatccttttgctccaacaaggagcctgagccaagtcctgaacatgatggatcagttcatggagagcccatttctctccgcttcccgtggcatggggggtggtctccgccgaagctgggacgctaaggaaacggaggatgccttgaaccttaggattgatatgccagggcttgggaaagaggatgtcaaagtgtctgtggaacagaacactctggtgatcaaaggcgaggccgaagaatccaaagaggaggaaaatggcgggaggtacaccagcaggatccatttgcctgaaaaagtttacaagactga

SEQ ID NO: 1181 - DNA, 268 bp, Gossypium hirsutum
  Clone ID: LIB3493-057-P1-M1-D3
ccctcccttggaagcgggtaacaaaggggaagggcaacatgagtggactcgaggagacccccgaaatatcccaaataacagaacttagagaggcttatagagcagtcggcctagatctggtggagcttctctattttggtggaatggatgctattgggttgctaaagagattcgaaaaatttgacaaaccctttccctatagattcaccgattactatggcaaaactcgggctaatcatccttattctcaggtacaacaaggggtcaa

SEQ ID NO: 1182 - DNA, 260 bp, Gossypium hirsutum
  Clone ID: LIB3493-057-P1-M1-D4
ccctctcggagctctgggcccctttacgttggggccccttccaagggctgcatccccctccataacttttctttagaatccatcccttcttcttcatttgattatatcaatttcctatatcaatgggcttttcctattacacctactgggattaccaggggctccattgctgaaagaacccaattccgtgcttatcttatttactccgccttcttcaccggatttagttacccccttggttcccattagctttgggccac

SEQ ID NO: 1183 - DNA, 352 bp, Gossypium hirsutum
  unsure (1)..(352): unsure at all n locations; Clone ID: LIB3493-057-P1-M1-D5
gatcacatcactgcccttgcacgggggtggtaccaatcaaggaaaatccccaaaaaaatattaaaaaaaatgagctctcagattttcagatctgcttctagagccgccagggctctcctttcagcatccaaggcttctcgcttttactctgaagggcgagctgtagctgcctctgcagcagtttcacttggcggtaaagtgcctcttttggcttcagcttatggaaggactgcttctgccaatgcatctagagcatggctttcaggaatttttgctcttccagnggcagcttacatgcttcaggagcaggaggttcatgcctgatagatggagcgcaccttcattgctatca

SEQ ID NO: 1184 - DNA, 373 bp, Gossypium hirsutum
  unsure (1)..(373): unsure at all n locations; Clone ID: LIB3493-057-P1-M1-D6
tgtctgctaagcactctcncaacgaggagtcanatccggtcgggattatttttccaggcttagaatggagacctttctattcacatctgagtcagtaaactagggtcaccctgacaagctctgtgaccagatctctgatgcagtgcttgacgcctgcctcgctcaggaccctgacagcaagggtgcctgtgaaacatgcaccaagactaacatgggcatggtgtttggagagattaccaccaaggccaatgtagactactagaagattgtccgtgacacatgccgctccattggatttgtttctgatgatgtgggtcttgatgctgacaactgcaaggggcttgttaatattgagcagcagagtcctgatatt

SEQ ID NO: 1185 - DNA, 351 bp, Gossypium hirsutum
  Clone ID: LIB3493-057-P1-M1-D7
tccgggtatatgcccttgcggtgacggcgctaatatgcgctaggcttgttgttacttgcttcaatatggggcttgattcttcagatcacaaaatcaactcgatcttctgcatgggcggtgctcatatttcgatgaatcaaaggaagccgggctatgctgtatccaagattgacacaggtcccttgccgccaacttatggtactgaattacctcgtaccgcatacttgggatctggatcgaaaggcgatctggaaaagctttggagaactctttatgctttgtatcatcctcaaaagcaatatgttgtacatttggaccttgagggaccctggcgtggaagagtgacacttg

SEQ ID NO: 1186 - DNA, 372 bp, Gossypium hirsutum
  Clone ID: LIB3493-057-P1-M1-D8
tccgaaaaaaaccaaaaaaagggaaagggaaagaaagaaaggagggccttttaagccctctctcttcttattatgcttcttctcagatcttagattctcttacttttcccatctgggtttttttttttcttttgtaaatttaatatcatcatctctttaaaactaaataaaaacataaccagcaaaggaatcctggattgttggtcgattgatagttgatcggtaattggtctcatgcttttcgattgaatccaacagcacccgatctctttatattgatataaataacccccctttgcttgattttctgtattttgataaacatggaaatggaacttggcaagctttttattggtgggagttctttggaca

SEQ ID NO: 1187 - DNA, 335 bp, Gossypium hirsutum
  Clone ID: LIB3493-057-P1-M1-D9
tccgtgtttctcagtggggaggagagggaaagtcatagagcagagcaatggtgcccattttcgcttctttctcttttttactcatttctgctctcttcattggtgcagactgtgggtctattggagtaaactacggaagaatcgccaacaaccttccttcagctaccaaagtagtggaactacttaaatcccaagctttaaaccgtgtcaaagtctacgacactgacccggctgttctccatgccattatctggatccgggatcaagggcaccgtcgacctcccaaaacagcaactctttgcccgtgcttaaagcactttctttgctaactcttg

SEQ ID NO: 1188 - DNA, 365 bp, Gossypium hirsutum
  Clone ID: LIB3493-057-P1-M1-E1
tgacttgctggtcctgagatggggatgggtggtctacgggactttgtcctccttgctcctgctgcttcttttaaccatcatcatcatcaccatcatcatcatactcaagatcccatcatggtgaatgaacaaatcaacggtccgagttccgccgccggcggtgccaccggactaggtgtcggtgttatcccactcctaacagcgtctccttggttacctccacaaaatgtggaagacactggtaagttcagtgggatgcaactatggcagaacccaagttcttcgcattatcttaaaaaaccagcttcccttcttgataataatccctccatgatggctggggaccgccggggaaatggtggagg

SEQ ID NO: 1189 - DNA, 376 bp, Gossypium hirsutum
  Clone ID: LIB3493-057-P1-M1-E11
ctcaaagcttcccattcgggctgggttcttcgtttgtgacgagctaactcactcactcactcagttactcgttttctctttggcacactcgctcgatctctctctagatttttccgattacaaatggaggatttcgatatcccggcggcggaagacatgatgaacgaagatatggatcttcccgacgagagtcccattctgaaagtcggagaagagaaggagatcggaaatcaaggcttgaagaagaagcttgttaaggaaggggaaggttgggagtatcctgaaatcggagacgaagtcgaagttcattatacggggaccgtgctggatggaactcagttcgattcaagccgtgatagaggcactcctttcaagt

SEQ ID NO: 1190 - DNA, 238 bp, Gossypium hirsutum
  unsure (1)..(238): unsure at all n locations; Clone ID: LIB3493-057-P1-M1-E12
aattacccaaatttcatccggccggacaagccgaggggtctcttantcactctttcatatcccaaaccttgtgagaaccctgtcggcgatcatttcttattgtaagggggcaagaacaacatcgtttattgttgattacaccggatcgagatatttttcaacatcgcgctccctggatgcttcaatggcaggggtttttgctgaaaatattcgtcggtttttaaagattttttttttc

SEQ ID NO: 1191 - DNA, 285 bp, Gossypium hirsutum
  Clone ID: LIB3493-057-P1-M1-E2
gcctttttacctgaaaatatagtccaagtttacgataatcaggttctttatactctgaagaagcctatctcccgggattgtttctataatttacaaaagaaaaataataatatctggttaatttcgtcaggggctaagcttatttgcttccataaattggtctatttagttcttctttcaatttattggttctgggtattcttggttcttggtcgatcgtttattttcaatttggttgaggatggtttgcatggtttctcgcactggaaggcacttgcagcgata

SEQ ID NO: 1192 - DNA, 357 bp, Gossypium hirsutum
  unsure (1)..(357): unsure at all n locations; Clone ID: LIB3493-057-P1-M1-E3
ggacgcgtgggttcactctgcgtctgggtgcaagaaatggatcgtanaantgcatttgccgttgctttgatttgctttgtggtgaccgctgtcggtggtcaatctccggcggcctcacctactaaagctccgccggcagcgactactcctgccactgctcccgctactgcccctgttagcaaacctaaatcaccggctccaactgctgcccctaccacttccccaccaacttcttcaccaccggctgcggctccggagaagtctgcggcggttccagccccatctaaatctgctccggcttcttctcctccggctgctgctccggtgagttctccaccggctccagtacctgtgagc

SEQ ID NO: 1193 - DNA, 375 bp, Gossypium hirsutum
  Clone ID: LIB3493-057-P1-M1-E4
ggaaaattgggtcgggttgaggggggggtgcagtcaagggtagtcatctttcaggacaacatttttgttaaaggattttcaaatattgggcttggtggtagattagtcttttaacaaatctacctggccaactaagagttatacacttttattaaatatttactaatgccttatatagttatcggcataatttcttgaagcggtttttcgtcgcaatcttatttgttaaatgagtaaatgatttcagcttttgtaattaatcatgatttggtaacctaatagagaaaagaaaagagcagcagaataatgagctttaattgtttaaaagttggctttgggggaagtgattttattaccctcgtatctagatgtttg

SEQ ID NO: 1194 - DNA, 345 bp, Gossypium hirsutum
  unsure (1)..(345): unsure at all n locations; Clone ID: LIB3493-057-P1-M1-E5
ggcatttgctgcccagaaaggtggtgagagtcaatgcacttgccaaggcattggctggtcagaaggatgaggccttcttctctgccaatgctgctgctcaggcttcaaggaagtcctccccaagagtgactaacgaggctgttcaaaaggctgctgctgctttgaagggctctgatcaccgtcgtgcaactaatgttagtgctagactcgatgcccagcagaaaaagcttgaccttncaatcctccccaccacaaccattggatctttccctcaaaccttggagctcaggagagttcctcgtgaattcaaggctaacaagatcttctgggatgattacattaaag

SEQ ID NO: 1195 - DNA, 380 bp, Gossypium hirsutum
  unsure (1)..(380): unsure at all n locations; Clone ID: LIB3493-057-P1-M1-E6
gctcaggcaggcaccaagatcaagggggagcgcatatcctgagacgacaagtgagtcanatcctttcccatgtgagccctaactctaatcctacctcgtatttctctttagctagacctttctcttcggccaccgacaccattcgagccactctcttccccggcgatggcatcggccccgagatcgctgagtccgtcaaacaggtttttagaactgctgaagtgccaattgaatgggaagaacattatgttggggaccaagttgatccaagaactcaaagttttctaacttgggaaagtttagaatcagtaagaaagaatcaggtaggcttgaaagggccaatggctactcctattggtaagggcatcggtctttgaatt

SEQ ID NO: 1196 - DNA, 332 bp, Gossypium hirsutum
  Clone ID: LIB3493-057-P1-M1-E7
ctttaactcacaaaagtgggacggctttcataataaactctttggtcctcctcacaatctcttccaccctgctcgtattccaaaacgattcctcaggttccacacaaggtcccagagccaaatatgtgatcggatttgtatgcacggtggctgcttcagcagggtacggattgatgttgtctctaacacaactttgtttccaaaagattctcaagaaacacacatttaaggcagtgttggacatgacaatctaccagtcatcggctgcaactttgatgatcagcgtgggtcttttccccagtggggaatggaagagtctgggccaagaaatg

SEQ ID NO: 1197 - DNA, 296 bp, Gossypium hirsutum
  Clone ID: LIB3493-057-P1-M1-E8
gccacactgatcttcgggaagcggaaaatgatcttggcatgtcaaactacccaatggttcctgggcatgaagtggttggtgaggtgttggaagtggggtcagatgtaagcaagttcagagttggtgatattgttggtgttggttgtcttgttggatgttgcagaaactgcctaccatgcgactcatacaatgaacaatactgtttcaagaagatctggtcgttcaatgatgtttacactgacggaaaacccacccaaggtgggtttgctggttccatggtccttgattaaaagttt

SEQ ID NO: 1198 - DNA, 99 bp, Gossypium hirsutum
  Clone ID: LIB3493-057-P1-M1-E9
acttctggcaagaggagttcaggaagaggttacaagaatgttccaagctttttggtgctttcaatattgctgactttatcccgcgtatgacatgggtcg

SEQ ID NO: 1199 - DNA, 386 bp, Gossypium hirsutum
  Clone ID: LIB3493-057-P1-M1-F1
aaaaagaaaaaaaaaagatggggtctgtgataaaatctgcaatcttaattctgtcggtgtttttatctgtaagcttcagttcgggtgttaggttgctccaggaacagcccaatgatgacctcaaaaacatggacgctattcctcccattgatgcactcaaccctaccgagttcaatggacccggtgttggcattcacgaagatcatgttgtcccaaaaggttccgaaattggtactcttggttttggttttgaaggtggtcctgaaaaatgttgttcttctggatgttccggtaattgtaatcctggtggtttcgttctaccatttcctcaaattccagaaatcccaagaattccacagatcccacagatcccacaaatcccacaa

SEQ ID NO: 1200 - DNA, 357 bp, Gossypium hirsutum
  Clone ID: LIB3493-057-P1-M1-F10
tggacatgaacagtggagaggactgtagtaacagaatagttatcgaccttactattacaactatattgttaaggtaagttagtattacctgaactccaactttataaatcggcttaattaatctagttactactcgatgtcttattacatccctaatgtgattgataattaaattggatggcattttatggaagtatatgttcttatgcacaatgcgatattgagcgacgaaaaataaaatcatagaattgctgatgacaactatcgtacgttatccgaccagcgctagacccaacaatttgccgattcgtaccacttatgttaggcacaactatcgatggttatttgactagcgct

SEQ ID NO: 1201 - DNA, 379 bp, Gossypium hirsutum
  Clone ID: LIB3493-057-P1-M1-F11
cccacgcgtccgcggacgggtgggcccttccaacctcccatggggggacctaggaatagatctagtcatcgaaggaaccggtgtgttcgtcgatagagaaggtgcaggtaagcacattcaagcaggagccaagaaagtgctgattactgctccaggtaagggtgacatccccacctatgttgttggagtgaatgctgacacctacaacccagatgagcctatcatcagcaatgcttcttgcaccaccaattgccttgctcctttcgtcaaggttctggaccagaagtttggtatcatcaagggcaccatgactaccactcactcgtacaccggtgaccagaggcttcttgatgctagccaccgtgacctcaggcgtgct

SEQ ID NO: 1202 - DNA, 378 bp, Gossypium hirsutum
  Clone ID: LIB3493-057-P1-M1-F12
gagaaacacagtgagggagaaagggtttctctgaagctacagaagcggctctccgcgagcgttctaaagtgtggaaaaggaaaggtttggctcgatcctaatgaagtcaacgagatctctatggcaaactcccgccagaacataaggaagttggttaaagatggttttatcatcaggaagccaaccaagattcactctcgatctcgtgctcgtcgcatgaaggaagccaagagaaagggacgtcactctggatatggtaagcgcaagggtacaagggaggcaaggttgcccacaaagatcttgtggatgagaaggatgcgtgtacttagacgcctactccgcaagtacagggaatcaaagaagattgacaagcacatg

SEQ ID NO: 1203 - DNA, 386 bp, Gossypium hirsutum
  Clone ID: LIB3493-057-P1-M1-F2
agcgccaaccacgtcctggcggggagacggaggcgcgaaaagctcaacgagcggttcataatattaagatccttggtccccttcgtcactaaaatggacaaagcttccatcctgggcgacaccatcgagtacgtcaaacagctccgtaaaaagattcaagaccttgaaacccgaaacaagcaaatggaggccgataacgaccggccgagatcggccgattcgatgcagagaaatagcagctctaaggatcaaagaagtgggttaacgacacgatcatcgggtcctgataaaaagaagatgaggatagcggaagcgacaaagcagaagacggtggaacctccaccgcaaacggaggaaacgtcggtcgaagtgtcgataatcgaaag

SEQ ID NO: 1204 - DNA, 372 bp, Gossypium hirsutum
  Clone ID: LIB3493-057-P1-M1-F3
cattttcagcagcaactttttgcttttggcagttaagtgaaacgatgccatactactcgaggggtggcgaagatgacgttgactagttcgacgaattcgatccgacgccttacggtggtggatacaatctcgaactaacttatggtcgtcctttggaaccctccgatgagacttgctacccttccgctacaccctccgatggcgactttgattacgcacgtcccgatttctcttccgggtacccgcacttagcttatgccaacgaagccctcgaaactgaatacagtagctatcttaaacccaagccccgacctggacgattcgaacctgcacctgcttttggtgactatggaaggaaacctgaatatgagc

SEQ ID NO: 1205 - DNA, 377 bp, Gossypium hirsutum
  Clone ID: LIB3493-057-P1-M1-F4
ccggtaccagtcaaggggtttctacgtgggtgcaaaggtggtgttttgcttccacaccataccctatcagggaagatttgcctttgcagatttaaaacgtctaaatttgcctgaacggttcaggagttcattcgatttcattgatgggtataacaagcctgtcatgggaaggaaaattaattggatgaaggctggaatattggaatcacatagagtcttgactgaaagcctatactatgcccaggagcttgtatctggtgaagacaaaggtgtagaacttgataacatcattcgtaaaactggcatcaccggcatcgtgaatggcatggatgttcaagaatggaatcctgcctctgacaaatacatcagtgtcaaat

SEQ ID NO: 1206 - DNA, 382 bp, Gossypium hirsutum
  Clone ID: LIB3493-057-P1-M1-F5
gctcatggcttcaagtgctgcaagcctggcatctaaaatgaaagcatggacttaccttgagtacggaaaatcatctgatgttctgaaactacaatccgatgttgttgttccccaacccagggatgatcaagttcttctccaagttgtagctgctgggattaaccccattgatttcaaaagaatgcttggaatgttcaaaaacagtgattcccctttacccatcattccaaggtatgatgtaacaagcgtggtggtgaaagtggggagccaagttaagaaattcaaggaaggggatcaggtgtatggagatataaatgaaaaggccatggatcacccaacacaatttggcactatagctcaatacactgttgttgcagagaag

SEQ ID NO: 1207 - DNA, 379 bp, Gossypium hirsutum
  Clone ID: LIB3493-057-P1-M1-F6
gccatattcaagctctttcacatggtgggttccttttctgggtgaatcaagttctttaaccatcagtgaccgtagcagcatactaaaatatgggtcgtggtctgggatccaacaccaagtctccggtaatggcacgattgctgttgttgagtatctgcataggaatattggcgaaggcggcatcagctcaagtgaagcccccaaatgcgttggcctcaaaactggggggctattgcggaaagagtacaatgtcctgctccatgaaatgcggttatctcggctgccttgcaggctgtgtgacatctccctcgatcggatgcggcactaagtgctttttcgaaaacaccaggtgccaatttggctgcaccccctttgatat

SEQ ID NO: 1208 - DNA, 321 bp, Gossypium hirsutum
  Clone ID: LIB3493-057-P1-M1-F7
tacggtaatcgttaaggctgcgaatgtactaagtgctgcaaattttatccctcccaagtcttttcgatctcgtagggtttatttcagcaatgaggaaaatggattactgtgttgccccaagggccaggctcaaaatgcgcaagcacaaatgttctctgaccctaacatggctatggacatgatgaagaaaaacctctctatgattatacctcagactctcacttttgcctgggtcaactttttcttctctggatttgttgcagccaaaataccctttccattaactcagaggttcagatcaatgttgcagaatggaattga

SEQ ID NO: 1209 - DNA, 380 bp, Gossypium hirsutum
  Clone ID: LIB3493-057-P1-M1-F9
tccgtacaggcccacttctgggtgatgcagcccaacatcggcatcatacattcctacatctcctttttacagcccaacctcacccttctatagccctacatctccatcatacagccctacgttcccagcatatagccccacttctcccgggtacagtccgacctcaccaagttatggtcccacgtcacctagctatagccctacctctccaagttacaattcgcaatcagccaagtacagtccatctctagcatactcaccaagcagtccaagggtgtctccttccagtccttacagttcaacatcaccgaattatagcccgaccgcgccatctcattcgcctacttcttcatcttattccccttcaaacccaacctata

SEQ ID NO: 1210 - DNA, 384 bp, Gossypium hirsutum
  Clone ID: LIB3493-057-P1-M1-G1
attgctatcttttcttcctcagggccaagtcttaaacgcccaattttgggaagctattttttctttctctgcagaactttcctggtacacattttcgctggacgggcataatttggaagactcaaagcaaagcactgctgatatgtctgttttcgtgcaaaatcttcttcaacaaatggtttcaaacaatgtcggagtccatcatcacaaagaatatccttttcgtatatttatagggggaatttaatgaatttgaagtttttactgtgcaataccgggcctggttgagatgctattaaacctgaaccttaatctgtggcaaccccaaatctaatttgctagatgatttttattttctaagataatttgtcctagcttacattc

SEQ ID NO: 1211 - DNA, 376 bp, Gossypium hirsutum
  Clone ID: LIB3493-057-P1-M1-G10
tccgcggacgcgtgggcaaaggagcgggcaaaaaattttagggagcacaacttcccccccccccccccccagtttcgctgttcagtgacaatggcgattgtgaatatggtgatggctgtggttatcatggcagcgaccctcggagggaaattgggtgcagcacaagtacaccatgtggtcggaggtgaccgtgggtgggacctttcctctgacgtggcatcttggtcctccggtaggagcttcagggttggagacaaaatctggttcgcctacgccgcagcacaggagagcattgctgaggtgaatagcccggaagaatatgagtcgtgcgatgtgagcaaccccataagaatgtacatggactgcatagatggca

SEQ ID NO: 1212 - DNA, 381 bp, Gossypium hirsutum
  Clone ID: LIB3493-057-P1-M1-G11
tccgggagaagcaacagaatcggggggacacttaacatgcctaaagacctggttgcttcaaagattgctgtgtgggctacggtatgctgctggacttatcagattgttatacactatttgttctatgcttaattacgcgtgtcggacataagtactttaagaaaaatgaagagtttaagtaacttagtcgctcaatactttttcgaatagcattttattactttcgtgtttagcctaatatattcaacttttttgttcttttgcagattgtcaacccatttaccaaatatccttttctttattctatgttactctggacttgactatgagtttgagatactggtatttacccatttaccaaacatgagttaacaatgtcta

SEQ ID NO: 1213 - DNA, 386 bp, Gossypium hirsutum
  Clone ID: LIB3493-057-P1-M1-G12
tccggccgcgtgtccatccgaagggcgatgcactggttatcagcatggagaacatcaccttgaactggtactttggaaatgatcgctcaaaacttgtttcaaactgcttattcaggatgggaggcgcggcaatactgctctctaacaaacgctctgacagaagaagatccaaataccaattggttcacactgttcgcactcacaagggcgcggatgataagtgctttgcttgtgttacacaggaagaagactctgcaggaaagattggcgttacattgtcaaaggatctcatggcagttgctggtgatgctctaaagaccaacatcaccacattggggcctctggttctttcgatgtccgagcagctgctattctttgctacattg

SEQ ID NO: 1214 - DNA, 356 bp, Gossypium hirsutum
  Clone ID: LIB3493-057-P1-M1-G2
tttgatccgaatgttcaaaggggcttaagacagttcctcctccttgttctcattagccagacagctgcttcattatttcggttcattgcatcagccgctagaaacattattgttgccaacacttttggaacatttgctttacttgtactttttgcattaagtggctttgtcctggcacgagaggacataaggggttggtggatatggggttactggatttcgcctttgatgtatgggcaaaatgcgttgatggttaatgagttcctcgggcaccggtggagtcgagtccctccaggctcaaacgaatcgataggacttcaagttttaaagtctagaagtttcttccatgaatcata

SEQ ID NO: 1215 - DNA, 382 bp, Gossypium hirsutum
  Clone ID: LIB3493-057-P1-M1-G3
ttgacacaaggttgctccgcgggagtgatcacaaagggcataattgagcctatttccagcgtttttgtgaacctggttaatgctgattacactgctaaacaaagaggactgcggattacagaggaacgcatccttttagatggttcacctgagagtccactggagtccatccaagttcagattgcgaatgtggaatcaaaatttgccagcgccatgtcagagagcggtgagatcaaggttgaaggacgggtgaaggatggaattccccatttgacgaaagtagggtcatttgaagtggatgtgagcttggaaagtagcattatactttgcagacaggttgatcagccaggcatgatcgggactgtcggcagcattttgggcg

SEQ ID NO: 1216 - DNA, 381 bp, Gossypium hirsutum
  Clone ID: LIB3493-057-P1-M1-G4
tctgtccttcggatctccgcggggcggtcttctgactcgcctaagaaccccgtcgtctccgaaaaatccgtcaagcagcccgctactgctccactcgccgctaccaaatctggtaccgcgcccaccactgctccaccgaagaatgcggttcctgggaaatggaccgtggatagctggaagtcgaagaaggctttgcagttgccggagtatccggatcaggcggagctcgagtcgggtctcaagactcttgatgctttccctccgattgtcttcgctggagaggctcggagtcttgaggagaagctcggggaagccgccatgggaaacgcttttctgttacaaggcggagattgtgccgagagtttcaaagagttcaacgct

SEQ ID NO: 1217 - DNA, 352 bp, Gossypium hirsutum
  Clone ID: LIB3493-057-P1-M1-G5
gtcctttgactaatcgtcaaggggggggagctttcctctctggatcaacctagactctcaatatccagcaaaattttaagttctctccaaaagctttctgttgaactcgtttctggtttatcattatagttgtgttgcagatcttcccttagtggatttcaggtttaaaatatttggtttaatgaattgttattcacaccactattatggaatttaattttattgttattattatttccatgttgtttccttgggaaaaaaaaaaaaaaaaacaaaaaataaaaaaaaaaaagggaaaaaaaaaaaaaaaaaaaaaaaaataaaaggggacaaataagaaaaatataaataa

SEQ ID NO: 1218 - DNA, 357 bp, Gossypium hirsutum
  Clone ID: LIB3493-057-P1-M1-G6
ctggatcgcccaactcctaggcggaaccgtcgcttgcctgttgcttaagttcgctaccggcgacctggctgtacccgcttttgggttgtcatcaggtgtgggcgtgtctaacgcattggttttcgaaatcgtgatgaccttcggattggtgtacacagtgtacgccacagccgttgatcccaaaaggggaagcttgggaacaatcgcaccattggcaattggtttcatcgtgggggccaacattttggcaggaggtgccttcgatggagcctcaatgaacccagctgtttcattcggaccagccttggttagctggacatgggataaccactggatctactgggtcggaccccttat

SEQ ID NO: 1219 - DNA, 189 bp, Gossypium hirsutum
  Clone ID: LIB3493-057-P1-M1-G7
ttcgagaaaatgatacagagggggtcaggtcacatcggccaggcctggatacatgcccgaaatgcctgctgggagctatactgtcttgaacatcggatccgacctgaatgactcatgccaattgacaagactgtcggccgaggggatgatgctctcaacaccttattcagacaaactggtgctggaaag

SEQ ID NO: 1220 - DNA, 335 bp, Gossypium hirsutum
  unsure (1)..(335): unsure at all n locations; Clone ID: LIB3493-057-P1-M1-G8
tacctncgcggacgcgtgggaaaaggcatctttctgttcaattcaatcctcctttttctattcaaccataatgtcttgcttcattagcaaatactcccatgagttggctaaaaacgctgcttacattggcacccctggaaagggtatccttgctgctgatgaatccaccggcaccatcggcaagcgtctttcaagcattaatgtagaaaatattgaagaaaacaggcgtgctctccgtgagctcctcttcactgctccaggagctcttcagtacctcagtggtgttattctctttcagtaaaccctttatcaaaaaaccgcttctggcaagccct

SEQ ID NO: 1221 - DNA, 365 bp, Gossypium hirsutum
  Clone ID: LIB3493-057-P1-M1-G9
cggacgcgtgggcggacgcgtgggttaaatcaaaagcaagtaggcatcaaaatcaaagcaagcaagctagtttcggacgacagtgagttcggcaaatacaaaaatggagagaacctcaactttctgcctcaagttttcaacttcagcagatcccggcctcggttagtttcgaatcacggtggctccgacaagaacgaaaccttctcttgtggggtggttttagacgatggttcgatttgtaaaaggccaccggttgaaggaagaaaacgatgcgctgaacacaagggaaagaaaactacaggggcttccacgagttcgagtatgaaatcacaaccgcataaagaggattattccgaaatcgagca

SEQ ID NO: 1222 - DNA, 294 bp, Gossypium hirsutum
  Clone ID: LIB3493-057-P1-M1-H1
atctgttcctgtgaattatggtgggcctgatctctttaatgcatgcaacacttctgcctctccacctatatatttgtttcaggtccctgcaaccttaccagttccatccaagaatgtatttcattctgcggcttctttgatgcaacatgggaattcatatcaaccttcaccatctattccatctgtagacctatttgctgggatttctgagcagcccccatctgctagttttggcggaaaattgccagagtcacctgtacctaaaactgaagaatgggcaatgttttattattc

SEQ ID NO: 1223 - DNA, 373 bp, Gossypium hirsutum
  Clone ID: LIB3493-057-P1-M1-H10
tccgctgtgttcacctttgtctgtgtatcatttatattgtggactttccatccattcatcttcaagagtaaaaagatctacactgttcttgtttggtgcagggtgctagcatttctagttgcttcttatattctccgaatcatcacattctattctactcagcttcctggaccaaattatcattgccgagagggttctaagcttgccagattgccaaaaccagagagtgtgttggaagtcctcttaattaattttcctcgtggtgtaatatatgcttgtggtgacttgattttatcatcacacatgaacttcaccttggtctttgtgctcacctatcaaaaatatggcactcgaagcttcataaagaactttt

SEQ ID NO: 1224 - DNA, 245 bp, Gossypium hirsutum
  Clone ID: LIB3493-057-P1-M1-H11
tccgcatgggactccagcagagtgaaggcatggagatgtgggtatagctgctattactagttgcacaaatacttcaaatcctagtgtgatgctaggagctgctctggtagcagagaaggcctgtgaattaggattggaggtcaagccatggatcaagacaagtctggctccaggttctggggttgtaaccaaacacttgcagaagagtggcttgcacaagtatttgaatcagacagggtctcata

SEQ ID NO: 1225 - DNA, 380 bp, Gossypium hirsutum
  Clone ID: LIB3493-057-P1-M1-H12
tccgggcgacgatggtgcctgacaacctaagccgtgaccagtacgtttatttagccaagttagcggaacaagccgaacgctacgaggagatggttcaattcatgcaaaagctcgtcctcggctctactcctgcttccgagctcaccgtcgaggaacggaaccttctctcggtcgcttacaaaaacgtgatcggatctctacgcgccgcgtggaggatcgtttcttctatcgagcagaaagaagaaggtcggaagaacgaggaacatgtggtgctcgtcaaggagtatagatcgaaggttgaatccgagttgtcggatgtttgcgctagtatcttgactttgttggactcgaatctgatcccatctgctgctgtgagtgag

SEQ ID NO: 1226 - DNA, 133 bp, Gossypium hirsutum
  Clone ID: LIB3493-057-P1-M1-H2
gatagctgaaaaaaaaaaaaaaagaaacttccccaagtttgggcagttattttcttggtggaaatttaaggatagcaagcttcttgaatgcttcttttaactcggcaataaatgagagcctttcttctttagt

SEQ ID NO: 1227 - DNA, 384 bp, Gossypium hirsutum
  Clone ID: LIB3493-057-P1-M1-H3
tcaatttgcctgaacggttcaagagttcattcgatttcattgatgggtataacaagcctgtcatgggaaggaaaattaattggatgaaggctggaatattggaatcacatagagtcttgactgtaagcccatactatgcccaggagcttgtatctggtgaagacaaaggtgtagaacttgataacatcattcgtaaaactggcatcaccggcatcgtgaatggcatggatgttcaagaatggaatcctgcctctgacaaatacatcagtgtcaaatatgatgcaacaactataatgaaggcaaagccattgttaaaggaagctattcaaggtgaggtgggattgccttgcgacagagatgttcctttgattggattcattggta

SEQ ID NO: 1228 - DNA, 383 bp, Gossypium hirsutum
  Clone ID: LIB3493-057-P1-M1-H4
aagccctcactttctctatataggagctgcagctgcgcccatctttgcttagccaaaccccaagtttcaagcaaacaagccaagggattttaattttgtttcattgatcagcagcaaatgagagaggtgaactttgagtaactctttttatataagcttttggtgatgatgcaagctaaaacagcaatggttaccactctttaccatcgaccacaccgccttctcctcgatacgcaaccgaacgcatcgccatcgctaccgaatggaagcaggacgcgcaatgctttcgccaatgaagccaactttgacaccaacatggtgatcatcctagcagctttgctttgtgcattgatatgtgctctaggactaaactccattatgcg

SEQ ID NO: 1229 - DNA, 372 bp, Gossypium hirsutum
  Clone ID: LIB3493-057-P1-M1-H5
gctagtgaaggcattccaaaaggcatattacaacaagtatggaggaggagccaacagcctcgctgatggatacagcactggaactggtttggcagctgaaatcattggtacctttgtccttgtctacactgttttctctgcaactgatcccaagaggaatgcaagagattctcatatccctgtcttggcaccacttcctattggatttgctgtgttcatggttcacttggcaactattccaatcaccggcaccggtatcaaccctgctcgtagctttggggccgctgttatctacaaccaggacaagccatgggatgatcattggatcttctgggttggaccatttattggtgcagccattgctgcaatcta

SEQ ID NO: 1230 - DNA, 108 bp, Gossypium hirsutum
  Clone ID: LIB3493-057-P1-M1-H7
cttggtataattgtttggtgagggcatttaatgtccgaaccattttggttgtgatttgagattatttgcttgtttataataaaaggttttggttataatttatctctc

SEQ ID NO: 1231 - DNA, 379 bp, Gossypium hirsutum
  Clone ID: LIB3493-057-P1-M1-H8
cccgctcaagattcgaggttcatcgaatcatggtccaaagtcatacccaacttagaccctcccaagacaccatcttctttcatgacccctcgccccgccaccccttctgctatcccttctaaactcaccgttaactttgttcttccttatgcatctgagctctccgctaaagaggttgacatggtaatagttccagcaacaactggacagatgggtattttgcctggacatgtccctacaattgctgaactgaaacctgggatcttgtcggtgcatgaaggaaatgatgtcacaaaatatttccttagcagtggttttgctcttatccatgccaactctgttgcggatattattgctgtggaagcagtgccagtcgacc

SEQ ID NO: 1232 - DNA, 380 bp, Gossypium hirsutum
  Clone ID: LIB3493-057-P1-M1-H9
cgaagctcggagatcagagaggagggtccacgacatgatggacgcggctcgaaagagagcacaaagacgggccatattccttgccaaaagacgcggcgaccctcaacaatccattcaagtcgtcggctctcgctgccgtatccaccgtgacgatgctctttatcatgccactcaagatcagcaaggcttgattccttggaatggaaaacaagatattttaatcgatagattcgatggccgagctcttcttgattttattcgcgagccagggacacgacattttaggaatcaagagaagtctgaagaggaagaagaagttgaagagtttgttaatttcgagcgttatcgggatttaattaaacatcgccctagaggattta

SEQ ID NO: 1233 - DNA, 357 bp, Gossypium hirsutum
  Clone ID: LIB3493-058-P1-M1-A1
ggaaaagcatttcatcatcagcgaaaaaaagggaattttagtcttcacgggaacgatcgaacgatgtcgtacctactaccgcacctgcactcaggatgggccgtagatcaggccatcttggcagaggaagagcgtctcgtcgtcatccgattcggccacgactgggacgaaacttgcatgcagatggatgaggtgcttgcttctgtcgctgaaacaataaagaactttgctgtgatttatcttgtagacataacagaagtacctgattttaacacgatgtatgagctttacgatccatcgacagtgatgttctttttcagaaacaagcacattatgattgatcttggcactggcaat

SEQ ID NO: 1234 - DNA, 342 bp, Gossypium hirsutum
  Clone ID: LIB3493-058-P1-M1-A10
gagagacactgctcatcagctcgatgagtcattgctgttcactactctctcgtcgttctctcacgtcaatgctccccccctccccctgaccttgcttccttcatctctgcttccttcaatcaccttaatggatcctaatctttcaaagttccccattttgtcctacatcttctcccaacaagaaccttacaattactcatcactcccttcccaaatccgccaggatttactcacccgtttcccccatttacccgatccatcaatccttgcttcactttcccgatccatccccacctccgtcacccaaacccattccctcctacgcctccctaggacctcggc

SEQ ID NO: 1235 - DNA, 367 bp, Gossypium hirsutum
  Clone ID: LIB3493-058-P1-M1-A11
ctataatagatggtttatgtgggctgccaaataaaatcagagaggtactgaagcttgaccaggaaatgaaggatcttgcaaagctattgattgctgaacagtcgcttcttgtcttcgggagaggatacaattatgcaactgctttggaaggtgctctaaaagtgaaggaagttgcacttatgcatagtgaggggatacttgctggtgaaatgaagcatggtcccttggcattggttgatgaaaatcttcctattgttgtgattgctacccgtgatgcttgcttcagtaagcagcagtcagttattcagcagctacttgcccggaaaggacacttgatagtaatgtgtgcaaaaggagatgctgcatc

SEQ ID NO: 1236 - DNA, 370 bp, Gossypium hirsutum
  Clone ID: LIB3493-058-P1-M1-A12
ccaaaacaaaatccaaagagtgggccaattttcaatttttaactatggcttcaaatcccaaggttttcttcgacatgacgatcggaggtcaaccggccggccggatcgtgatggagcttttcgcagacgtcactcctcgtaccgccgagaacttccgggcactctgtaacggcgagaaaggcgtcggtcgttccggtaaaccactccactacaaaggctctaagttccaccgcgtgatccctgatttcatgtgccaaggaggtgatttcacagccggaaacggaaccggaggtgaatcgatatacgggtctaagttcgccgacgagaacttcatcaagaagcacaccggacccggcatactatccatggg

SEQ ID NO: 1237 - DNA, 373 bp, Gossypium hirsutum
  unsure (1)..(373): unsure at all n locations; Clone ID: LIB3493-058-P1-M1-A2
agaagacattattcgtctgattgagatggttcctcagattctgagatagaatcatctgaatctgatagtgattctgactcatatctctcatcttcctctgacattagttcctcaagtgatgatgggcacaaaaagaggaagagatattttaaaagaggaaaatataggcgtggaaaaaagagagagagacgacgtgacaaaaagagaaaaaggcgtgataagagatcaaagcgtaaatcaagaagggcatcagatagccttacagatgatgacagtgagagtagcanggaaagcagcagtgacaatgatgatcaaggaaaaccacagaagcatgaagggccttctcagaaaagtgttgggaaccaatcccctt

SEQ ID NO: 1238 - DNA, 346 bp, Gossypium hirsutum
  unsure (1)..(346): unsure at all n locations; Clone ID: LIB3493-058-P1-M1-A3
tcaatcaccaccttcctnccagagtcacgcatgactacaccactccgcagctctacttctggtttcaaccatancagtacaatggatagaccatctttgatgctggatcctaggaaggcaaggtattcaagattgttttctccattgccaaagctacctaacccatcggagacaacacctgcagccatgagaagcagtagcaagttcatgggaagtcctccaatgcaggtgggttcgtccaagcccaagcatcctaccgtggttgcttttcaaccgaaatccttgctttggagtccactcaacctcatgggcactcaaaagaaccaatcattttttccattaccac

SEQ ID NO: 1239 - DNA, 371 bp, Gossypium hirsutum
  Clone ID: LIB3493-058-P1-M1-A4
caaagctctctctctctattctgtttggcttatctatcgctttgatttcgcatccttgctgtgcactcgatggcaaatcgatggttgaggcctgaggtgtatccgctgtttgcggccgtaggtgttgctgtcggaatctgcgggtttcagttggtgcgcaatatctgcatcaaccctgaagtcagggtaaccaaggagaacagggctgctggggttttggacaactttgctgagggagaaaaatattctgaacatttcttgagaaaatatgtccgcaacaagacgccagaaatcatgcccagtatcaacagcttcttcacggacccaaagtgaggcttcactcttgctttatgctgaaactaaaaaataaa

SEQ ID NO: 1240 - DNA, 372 bp, Gossypium hirsutum
  Clone ID: LIB3493-058-P1-M1-A5
cagccagccaccaagatcaatggcgacgcatatcctgagacgacaagtgagtcagatcctttcccatgccagccctaaccctaatcctgcctcgtatttctctttagctagacatttctcttcggcaaccgacaccattcgagccactctcttccccggcgatggcatcggccccgagatcgctgagtccgtcaaacaggtttttagaactgctgaagtgccaattgaatgggaagaacattatgtcggggaccaagttgatccaagaactcaaagttttctaacttgggaaagtctagaatcagtaagaaggaatcgggtaggcttgaaaggtccaatggctactccaattggtaaaggtcatcggtcttt

SEQ ID NO: 1241 - DNA, 272 bp, Gossypium hirsutum
  unsure (1)..(272): unsure at all n locations; Clone ID: LIB3493-058-P1-M1-A6
tagatcttcttcaatctaagctgctcgaagacttaaaatggctcgcaagaagatcanagaatacgattccaagagacttctcaaacaacacctcaaacgcctcgctaatatcgacctccaaatctgttctgctcaggtgactcaatctactgatttcaccgagttaacgaacgaacaaccatggctttcgtccaccagattggttgttaagccggatatgttgtttggtaaacgtgggaagagtggcttggttgctctcaatttggatcttg

SEQ ID NO: 1242 - DNA, 313 bp, Gossypium hirsutum
  unsure (1)..(313): unsure at all n locations; Clone ID: LIB3493-058-P1-M1-A8
gctaggtgtcttcagagagtnagtnttaattcagacaacgcatggtcagtgtcngctcatggtggggtgactgcccttttgaaaatatgttcaagcggtgagtttggaggggaactgattggtcttgcttgtgcgttgttgagaaatcttgttggggttgacgagataaagaggtttattgttgaagaaggtgccatttcaacgttcatcaagcttgcaagatcaagagatgaaatcgtgcagataaattcaatggagttccttcagaatatggcttccggagatgactcagtttgtcaaatggttgttagag

SEQ ID NO: 1243 - DNA, 348 bp, Gossypium hirsutum
  unsure (1)..(348): unsure at all n locations; Clone ID: LIB3493-058-P1-M1-A9
gttttctttatcactgagaaatggcttgctgtggtggaaactgtggctgcggtactggctgcaagtgtggcagtggctgtggaggatgcaagatgtatccagacctgaacgctgccgagatgaccacaactgagactctggttcttggtgtagcaccccagaaagcacactttgagggagctgagatggaattcggggctgagaacggctgcaagtgtggagacaactgtatctgcaacccttgcaattgtaaatgattagagaccaaagccaaagctccctggaagcagaggcgcctttgtctttaagaaataatatgttttgttgtttatgtgtntttagaataaa

SEQ ID NO: 1244 - DNA, 368 bp, Gossypium hirsutum
  Clone ID: LIB3493-058-P1-M1-B1
atttatactcgagtaaatctggaggctttaggagatggtataatccaccttggttttcagaggtcactccatcggttccatacgatcctcttgttcttagacgtgcatttgaaaatgctgtgatcaaaaggttgatgactgatgtgccttttggagttctgttatctggaggacttgattcatcattagttgcttccatcacagctcggtatttggctggtaccaaggctgccaaacaatggggaagccagctccattctttctgtgttggcctagagggttcaccagatttgaaggctgcaagagaggtggcagactatttgggcactgttcatcacgagtttcacttcaccgttcaagatggaatt

SEQ ID NO: 1245 - DNA, 350 bp, Gossypium hirsutum
  Clone ID: LIB3493-058-P1-M1-B10
ggtggttgatgcagctggggaggcccatccgcactgtccgcagctatatctttatagcacagctgataaggtcgttccatatgagtcagttgagtgttgtatcgaggagatgagcaagaaagggataaaggtatcgtccttcaactttggcacatctcctcatgtcgaccactaccggaatttccctaacttgtactcatcagagctttatactttctttaaagaatgtttcccactttctaaacaaaaatgaaccctccaagtacttcaatcactttattgttgttgttgtatgcggatattcctttggaaataaaccttttcctgggcatgaagttgtactgtttatc

SEQ ID NO: 1246 - DNA, 249 bp, Gossypium hirsutum
  Clone ID: LIB3493-058-P1-M1-B11
gtttgagaattgacagggggtacgcgagaagcattggctgccccatgcacccaccgacactctgtttctcagtagatattggatcaaatctttttaaggaagtgcagctggcatccatttctgattccagtgctgaaatattccagttttcgtttacatttttctgagaaggttaatcttaaactggcccagggagtgatgaaagaacatataaatactgcattattctaggctccgaagaaagcataa

SEQ ID NO: 1247 - DNA, 309 bp, Gossypium hirsutum
  Clone ID: LIB3493-058-P1-M1-B12
gtcgaaactctgatctgggatcccgccctccctggaaacgttactgttttaggtctgacggtagatttcactaaaaaccgccttctcgcttgcctccactctgggggccctctccctccattcaacgccctcgtcgcctacgacctccgcacccgccggcgcctctttctctccctcctcccctccgaccctgatttccccatcgcctcaatccgccgcgggcgtgaccttgccaaccacgttgccctcgacttcaagggcaacgcttacctcaccaactcgggcggaaacttcatctggaaaggtaac

SEQ ID NO: 1248 - DNA, 247 bp, Gossypium hirsutum
  unsure (1)..(247): unsure at all n locations; Clone ID: LIB3493-058-P1-M1-B2
ccctcccctatactctcatctatcatatagtatggcggcaactaaaagtaagtgcactttctcatcctttnagtttgtgtttacttgangccaanaagcggacggggagaactcctactgcaggaagatattaggggtgganaactactcattgaatggattccccgtgatggtcattcttcttatcatggttatttaaaattctccaggatacttagttatagctttaattttaccatctccatcc

SEQ ID NO: 1249 - DNA, 132 bp, Gossypium hirsutum
  Clone ID: LIB3493-058-P1-M1-B3
cgcactcaagatggagatcattggaaacgccaaagaggtcaatggaatcaatgttcttcaactggaaactgcagctggtgcagcaattaggttctttgatcatgctattggtatcaacgtacctcgatcgcg

SEQ ID NO: 1250 - DNA, 372 bp, Gossypium hirsutum
  Clone ID: LIB3493-058-P1-M1-B4
ccttacgagagctattcccgaagatgggaaacaaaaagagccttgcctcttcagaggaaagggtccttataaaaggaaaagcttcattgttagcagcagttgattactatgttggtatgcatagtgatatctttgtctcggcctctcctgggaatatgcacaatgcgttggttggacaccgaactttcgagaacatgaagaccataagaccaaacatgccattattagggcaactcttccttaacaaaaacattacttggtcggaattccgtcaagcagtggtggaaggtcatataaacagacaaggtcaactccggttaaggaaaccgaaacaatccatatatacatatccggctccggattgtgtgtgcc

SEQ ID NO: 1251 - DNA, 371 bp, Gossypium hirsutum
  Clone ID: LIB3493-058-P1-M1-B5
ctcaaatgcaattactttatgggtttggaaacatgtccatacatgatttaagtataaaaagttattttttataccataataatagtattttaattgtaggatacatattttattttttaaatataatcatgttattttactaatcttatttagaaaaatctaaaaaatatatatattaacgggagataattttctatacattttggcttaccatatcaaacacgtctagggaactagaatttttgtaattacaagagggtgtaattactatattagtaattacactttcatctaattactttgtaatatccaaacgcacctgttattggaaaagaatgttgaatgagtaagaatggggaagttagcttcag

SEQ ID NO: 1252 - DNA, 312 bp, Gossypium hirsutum
  Clone ID: LIB3493-058-P1-M1-B6
gaaaaaacaaaacctaaaacctgaaagcccaaaattcaaaatggatgtaattaaaacccagcaaatttcatctcgacccatagagaaggtgatagttcatcctttgggtcttttaagtatcgtcgataactacaatcgcgtcgcgaaagacacgcgcaagcgcgtcgtcggagtcctccttggttcttccttcaaaggcaccgtcgatgtgttcaacagctactcagtgcctttcgaggaagatgagaaggacctcagcatatggtttcttgaccacaactaccatgaatcaatgttttcgatgttcaagag

SEQ ID NO: 1253 - DNA, 367 bp, Gossypium hirsutum
  Clone ID: LIB3493-058-P1-M1-B7
agagatatgaacagtgagttgtgtgtgttaaaaagtttgtgcattgcttttactcaggaagaggaggatcttgtaaatgctcacagggaacaagtggaggagaccatgaatattgtcaaagaggtaagcaattagaccatttcattgaagtacctgtgttgctttgacttcttgtttttcttcaagtattttgtatccaacattcatgtccaactcatatcgaaatacgagtatcgggatataaaccctccgagggccttctaaatacatggaaatgcttaaaatgaaatgaacatatatctgggtcgtacacacatccatccaagtatcatagttttggtttaccataggtttggtataacatctt

SEQ ID NO: 1254 - DNA, 364 bp, Gossypium hirsutum
  Clone ID: LIB3493-058-P1-M1-B8
cggagtttcgacgacgccgaagagtccgttggcgaggattcagacgcagaagaacggtggaatctgtcatgacgatagcgggaagcctgttaaggctcagacgatcgacgagcttcactctttgcagaagaagagatcggcgccgacgactcctcttgacggcgttcagggtacctttgccaccatttctgaagatgagcgccagaggcagcagctccagtccatcagtgcatcgttggcgtcactcactcgaggaacagggccgaaagtggtgagaggggacccggcagggaaggttcaatcggtgtcgcatgtggcgcaccaccaccatatcgaggcgccaaccattagcgtcagtgacagt

SEQ ID NO: 1255 - DNA, 198 bp, Gossypium hirsutum
  Clone ID: LIB3493-058-P1-M1-B9
tgctgcccttctataaaggggagacgctaattggggtcatggtggtgctgtataggtagtggacaagttttctgttaggattctcggatcaagtagcaaactaagggcatcaatctcgactgcttgtttcacaatcttgggaaaatggctataggattctggttggaaggtaaatccttttaattcttgcttctcgaa

SEQ ID NO: 1256 - DNA, 364 bp, Gossypium hirsutum
  Clone ID: LIB3493-058-P1-M1-C1
ctttgatttgtttctaaggatggaaggtctaaaccttcttcccatttcttcattacattgttcaagaacaaacaaaaaaaaaaagaagcaaaaaaacatggccaaaggtctggtggtcattgctctatgtgtgcttccagctttggttagtgctacacgcattctgaataaccaattggtggttgaaggctatgtgtactgtgatacttgccgtgctggttttgaaacccctaagactagaaggctagctgatgccatggttaagctggtatgctccgacaggaagaccggcggagttgttttcgagaaggagggatataccgacaaaaccggaaaataccagattcgtgtatccgaggatcac

SEQ ID NO: 1257 - DNA, 276 bp, Gossypium hirsutum
  Clone ID: LIB3493-058-P1-M1-C10
cttttgatcagtatacacgctggtactcatttatggctttacagtggggagaccaggagcaagcatcgctgagagggtggcgactgacaggcggctagcaagctgctctagtgagccagggttgcatgtaaatagtgtgttctcttttcttttcttttttttcaatgtgctattttgtctctgtctttgtctcttgatgctatttgatgtctcgagtaaccgtagaaggtgttttaagagctgacagctaaagctttagtttgcccttgttttttt

SEQ ID NO: 1258 - DNA, 362 bp, Gossypium hirsutum
  unsure (1)..(362): unsure at all n locations; Clone ID: LIB3493-058-P1-M1-C12
aaatcacaattgcttggaggagagtccagttacgactccggcgcattcggttcttcccaccctcggttcctttggtggaagcatcgaaccacggaaaagtgtcaggggccttggggactccagatcacctgttcaattgactatcttttatgctggtaccgtgaatgtttatgatgatatcacccccgagaaggctcaggctatcatgttacttgctgggaatggatcttccttgacttctaatgtggcacatccaaatgtccaagtccaggcaccaatttcaaaaccacttcaattcgaaactcttnccacgaatcatttcacaaatgcagaactttgttctggtatcccaagccctttat

SEQ ID NO: 1259 - DNA, 370 bp, Gossypium hirsutum
  Clone ID: LIB3493-058-P1-M1-C2
aaagaagttgccaaggttgttagatgtgggtcggggagtttggcctacctgctccgcttgggtagcttggcggaagatgggttgtcttataacgaaaagtatatagtgaggtgttatgaagttttaatcaacaaaaccgccactattgaaacgctagctaatctcttgcaggagattggatctaaccatgctcaaagccttggattttcgacagacgggtttgctacaactcccaccatgagaaaaatgcatctcatatgggtgaccgcacgtatgcacatagaaatatacaaataccctgcttggagtgacgtggttgaaatccaaacatggtgccaaagtgagggaagaattggaaccagaagggact

SEQ ID NO: 1260 - DNA, 367 bp, Gossypium hirsutum
  Clone ID: LIB3493-058-P1-M1-C3
ttatcattcaccaatgcttgcgcgtcatgcaagccaccaaagcccattccaccacctgctgcatgccctccaccaccagcaaagcctgcttcttgccctaaggacacattgaagctaggtgtttgtgctgacctgcttggactggtaaacatagtggtgggagcacctccttcgagcaaatgctgtgctttgctccaaggcttggctgatttagaggctgccctttgcctttgcaccgccattaaagccaatgtgcttggggccaacctcaacatccctattacccttagcttactccttagtgcatgtcagaaggaaatccctccaggcttcaaatgttgatatttttttttaagaagcacaatca

SEQ ID NO: 1261 - DNA, 371 bp, Gossypium hirsutum
  Clone ID: LIB3493-058-P1-M1-C4
cggacgcgtgggttttcttccagttcggcacatgctctgcaactgaactctgagacaacaatgcaaaagaaaatacaggtagcatgctcaatcttggagctctcagaacctcccatgcttcactttgagaaggaggcttatcaaaattacctcgacttcctccaatatttagtcaaaaagaatctgtccatttccaaggagatgaacctagaattactgcttgtagcagtgtgtgaaaaaataatgaaaatatacctcaactgtactactgtgaaccataatgtgcaacggaaatcgggggacaaggtggtagtggtgactcattggactcttccattaagttcagccaagaaggaagaattggcagctag

SEQ ID NO: 1262 - DNA, 249 bp, Gossypium hirsutum
  unsure (1)..(249): unsure at all n locations; Clone ID: LIB3493-058-P1-M1-C5
gcaagttggaaatgagaggtttgatatgttcagcggttgcccatcangacggacagccactatagttcttcgtggtggagctgatcagttcattgaagaagctgagaggagcttgcatgatgcaattatgattgttagaagagctctgaagaactctacagtagttgctggaggtggtgcaatagatatggagataagtcgatacttgaggcagcatgcacgcacaataactgggaagtcgcaactttt

SEQ ID NO: 1263 - DNA, 370 bp, Gossypium hirsutum
  unsure (1)..(370): unsure at all n locations; Clone ID: LIB3493-058-P1-M1-C6
agaagacgctgcaaacaattttgctcgtggccattatacaattggaaaagagattgttgacctctgcttggatcgtatccgaaagcttgctgataattgtactgggctccaagggttcttggttttcagtgctgttggaggtggtactggttcaggtcttgggtctcttctccttgagcgtctctctgttgactatggaaagaagtcgaagcttggtttcactgtctatccttcacctcaggtttctacatctgttgtagagccttacaacagtgtgctgtccacacattcactccttgagcacactgatgtttctgtgcttntcgacaatgaagcgatatatgacatctgcaggcgttcccttgacatt

SEQ ID NO: 1264 - DNA, 362 bp, Gossypium hirsutum
  Clone ID: LIB3493-058-P1-M1-C7
ctttgtttttgagctccgaaagtgaaaaaactctgcaatttttatcaaatcttctagacaacgatgggatctgaatctcaagttgtttgtgttactggtgcctctgggttcattggttcattgctggtcatgaggctactcgaacacggttacactgtccgcgccaccgtccgtgatcccgataatcaaaagaaggtaaagcacttgcttgatctaccaaaagccaacacccatttgacattgtggaaagctgatttatctgaagaaggaagctttgatgcagccattaatggctgttgtggtgtcttccatgttgccactccaatggattttgagtccaaggaccctgagaatgaagtgat

SEQ ID NO: 1265 - DNA, 284 bp, Gossypium hirsutum
  Clone ID: LIB3493-058-P1-M1-C8
ggaactcgattatctgggtggggctgtggcaaatcccaagaagccatttgctgcaattgtcggtggttctaaggtatcaaccaagattggagtgattgaatcaggcggggccaaggttgatattctcatactgggtggaggaatgatttataccttctacaaggcccaaggacatgcagttggatcttcacttgtggaagaagacaaacttgatctagcaacattactccttgagaaggccatggcaaaaggagtctctctcttgctcccctctgatgtggttg

SEQ ID NO: 1266 - DNA, 347 bp, Gossypium hirsutum
  Clone ID: LIB3493-058-P1-M1-C9
ctttcagatcatcaaagggctggaacaatggttccattcaagagaaggagagagggaaagactgattacagggctaggattcgcttaaccaatcaagacaagaacaggtacaacacgcctaaataccgattcgttgttcgatttagcaacaaagatatcactgcacaaataatttctgctaatattactggtgatatgattcttgcctcggcttactcgcatgagcttcctcgttatggacttgaagtcggtcttacaaactatgccgctgcttattgcactggattacttttggggcgccgtgtccttaagttgcttgaaatggacgatgaatatcaagggaatgt

SEQ ID NO: 1267 - DNA, 370 bp, Gossypium hirsutum
  Clone ID: LIB3493-058-P1-M1-D1
gctaagctagccaacagcaaccggtcacattcatcattcttttttattttgctttatattccatgttgcccaattcttgaaagtaaccgttgcggctcggattgattggcggcttgataatcggagtcggagaaaatgcggggaaaggcggtttccgggaaagcaattctggtattgtgcctggctagctttcttgcaggttccctaataactagccgaacttggacttctcaatctcataacaacaaccatcctattgtgaaccatgttactgctagcaataaattgggagaatttgatcacaaattacgtaaattaggtgaaggaaaggcagaagatataatgggagaagtctccaaaactcacaagg

SEQ ID NO: 1268 - DNA, 358 bp, Gossypium hirsutum
  Clone ID: LIB3493-058-P1-M1-D10
cccacgcgtccgaatatgctctgattctaaagctaagagttttaagttaacgaagcatttgggtcgtttcgaagtaatggaaacttcaggaaaagtaaagaagggagccggaggaaggaaaggtggtggcccgaagaagaagcccgtttcaaggtctgtcaaagctggtctccagttccctgttggtaggatcggccgttatttgaagaaaggaaggtattcgcagcgggtcggaaccggagccccggtttacttggctgctgttcttgagtacttggccgctgaggttctggaattggctgggaacgctgcacgtgacaacaagaaaaacaggatcatcccaaggcacgttctactc

SEQ ID NO: 1269 - DNA, 366 bp, Gossypium hirsutum
  unsure (1)..(366): unsure at all n locations; Clone ID: LIB3493-058-P1-M1-D11
agataatgatggacgcagagacgacaacgagtttgtagccatgatgcanaaaggacatgtcaccacaaatggtggcagtgctggtgctggtaaggaaggcttacaacatagttttggtattggatttagagaagcatttaaactttagcatatgcatctcttcatgttcttgtgttatgatccgagacttagctccggtcacgtatagccttactcacggatcgtgacacttgttaataggactgagatttgtatagtaaaaagtaccaaagcaatgctcattgtaaggggcaggtggtggattttccattttcttcaaccttttttttctgcattcagaatgagggtcctttaatgttgtatact

SEQ ID NO: 1270 - DNA, 366 bp, Gossypium hirsutum
  Clone ID: LIB3493-058-P1-M1-D12
gttttgaatctagggatttgcgggtggagaagacgagagctcatctctctgcttcaaagctcctgtccgggtagaattctcttcttcctttgcgttgtgttctttgttgttcaatcgccatggcttcaaagcggattttgaaggaactcaaggatttgcagaaagatccacccacttcttgtagtgctggtccagtagctgaagacatgtttcattggcaagcaacaatcatgggaccctcagatagcccttatgctggaggtgtgtttttagttactatccatttccctccagattatcctttcaagcctcctaaggttgcgtttaggaccaaggtcttccatcccaacatcaacagcaatggaa

SEQ ID NO: 1271 - DNA, 366 bp, Gossypium hirsutum
  Clone ID: LIB3493-058-P1-M1-D2
gagatgttcgcctcattatggagcggaactcaagacgttctaaaggggttgggtatattgagttctatgatgttatgtctggccctatggcaatagcactctccggacagcctcttattggtcaaccagtgatggggaaaccatctgaagctgagaagaatctagttcaatcaactacatctgcatcagctggacagactggtccatatgctgctggcggtagaaagttgtatgttggtaacctacatttcaacattacagaagaccaactgcgtcaggtttttgaaccttttggttctgtggagctcgttcagttgcctcttgatgaaactggtcattctaaaggttttggttttgtccagtttg

SEQ ID NO: 1272 - DNA, 358 bp, Gossypium hirsutum
  Clone ID: LIB3493-058-P1-M1-D3
gaaacacccaagtatgaagtgggtcagtcctcggctgactatgaaatccgaaaatacccacctgcagttgcagctgaagtcacatacgatccatctcagttcaaggggaataaagatggtggcttttcgttgttggcaaattacatcggtgctttaggcaatacccaaaatgcaaaacctgaaaagattgcaatgacagctccagtgataactaaatcacctggaaatgaaagtgaaaagattcccatgactgctcctgtggtgacaaagggtgacaacaataacatggttaccatgcaattcctattgccggcgacgtataagacagcggaggaagcaccgaagccgttggatgaga

SEQ ID NO: 1273 - DNA, 370 bp, Gossypium hirsutum
  Clone ID: LIB3493-058-P1-M1-D4
cgatgtacaaaaatgatgatcggagagccaacacgaccaaatcccaccgttaaaatcccggcgtgggacccactcaatgatccgacgtctaattattcttccgttaattataactgcaatgcgccgtccagtccttgtcccgtcgattacctctcatcgctccaccggtacctcccgtcaaaccatttcgagtcgtccgactctctgagtgaggattcggattttcctgttgacgcgttctcgtgtgaccatttccgtatgtatgagttcaaagtgaggaggtgtgctcgtggcaggtcacatgactggactgagtgtccgtacgctcaccccggggagaaagcccggaggagagacccggggaagtttc

SEQ ID NO: 1274 - DNA, 371 bp, Gossypium hirsutum
  Clone ID: LIB3493-058-P1-M1-D5
ctgaatagtcggtgaagcagaggaggcagaaatggtgagagtagccacctactttggaatgtcattaggcgccttcgttttctggcaatctatggaaaaagtccacgtttggatcgctctccaccaagacgagaagaaagagagactgaatagtgaagcggagatcaggagaatgagggaggagctgcttcatcaagccaagcagaatgagcgtctcgcgtaaattctgcgttgttgtcgttgctgtttctttcttcttcttttttcccaactattttaagcccgatttgttttaattagactcaagtggaactgtggttgaaaaccataatattgcctttgatgatgagctggataaccccatgacatgc

SEQ ID NO: 1275 - DNA, 370 bp, Gossypium hirsutum
  Clone ID: LIB3493-058-P1-M1-D6
aaacaaagagaacaatggtgtgcatacgcaaggcgaccatggacgacctactggctatgcaagcttgcaacttgctttgccttcccgagaattaccagatgaaatactatttctaccacatcctctcttggcctcagcttctttacgtcgccgaggactacaacggccgcatcgtcggttacgtcctcgctaagatggaggacgaaagcaacgagtgccacggccacattacctctctcgccgtcctccgcactcaccgcaagcttggcctcgccactaagctcatgaacgccgcccaagccgccatggagcaggtgtttggagcagagtatgtgtcgctgcatgtgaggaagagtaacagggcagcgtt

SEQ ID NO: 1276 - DNA, 367 bp, Gossypium hirsutum
  Clone ID: LIB3493-058-P1-M1-D7
ctttttccctttgttttggtgaggtacaaatagtggaaacctaatagccatggagtattagagccaccccatacaaatagaaagaggaacagcttcttgccctaaagaaaagaaaaaaaggaagggaacttggaagaagagggtgaaaaaagaaaaagaaaaaaagggtttctgaaaaataccataggtgatagttttttcttttcacttttataataataagaatatatagtaatggggagaggaagagtggagttgaagaggatcgagaacaagataaatcgacaggtgacgtttgcaaagaggaggaatggtttgctaaagaaggcttatgagctttcaattctttgtgatgctgaggttgctc

SEQ ID NO: 1277 - DNA, 349 bp, Gossypium hirsutum
  Clone ID: LIB3493-058-P1-M1-D8
ggttgatgctattgatgagtatgctgtcggacagctcaaagaatttgagggcaaaaagcttgtgtcagctaccaaggaaggtcttaaacttgatgagagtgaggatgagaagaagaagaaggaagctttgaaggaaaagtttgagggtctttgcaaggtcatcaaggatgtgctgggtgacaaggttgaaaaggttgtggtttctgatcgtgtggttgactcaccttgctgtttagtgactggcgagtatggttggactgcaaacatggagagaatcatgaaggcccaggctttgagggataacagcatggctggttacatgtcaagcaagaagacaatggagatcaac

SEQ ID NO: 1278 - DNA, 367 bp, Gossypium hirsutum
  Clone ID: LIB3493-058-P1-M1-D9
aaatgaatctgcaagtcatgtgtcgctattgttggataaaggattcaaaactcaagagcgttgcatctttcacccactttccaatgacatgtcaatctctcttaatgcctttggtcttgacaagtttcttaaatcaattgggagagacccaacttatattgatctggaggctaaccctcctgtaggaaaagatcaacctcctgatctagcttctttagttccattgggttccacagttctgcctgatcttcccgagaaaaccccttcacaagattcatctggaaatcatcctagtgctggtaataattctacagcagttacagcaaaagctgataagccatctagtgctgtgcaaaatgttaaggag

SEQ ID NO: 1279 - DNA, 182 bp, Gossypium hirsutum
  unsure (1)..(182): unsure at all n locations; Clone ID: LIB3493-058-P1-M1-E1
ccctcctcgcgagctcctgcggcgcaaataaggtncgcagtnagacccaatgggcancttaaacttnctnactttngattancactcatatttnggangccagatccgaangttactcaccagggcttttcgtcatcggatanaggtcctggattacttttttggaccaaggtatatgggtc

SEQ ID NO: 1280 - DNA, 283 bp, Gossypium hirsutum
  Clone ID: LIB3493-058-P1-M1-E10
gagaaaacatgtagatgaggagaaagattatgcacatcttttggagcggttacttgactagctcctgacaggggaggaaatgaagatagacaatagcaagattgggaggatgctgctgtcttgctgagacaggcgcaaacataggaaaacgtttcgaagcataaaggaacttaaagaatcggggatacacgtgaaggctagcacgacgaacaacctcaaggacatgcacttttattggaacttcttggggaaactgtggatgccttgcttgttggtggatcat

SEQ ID NO: 1281 - DNA, 365 bp, Gossypium hirsutum
  Clone ID: LIB3493-058-P1-M1-E11
ctcgcgtacacgtctttgaccggtctgtttccgctgttgtcaaggggtcaattgcgattagtaaaagtggaggaaatatcacagaccatagatgctgaaaatttaaccgtgcagaactctgtccaattctcggggccgttagcctcgagttctattagtgcaagtgcaaagttcgaggtccgaagtcccaggcgagtgcagatcaagtttcaggaaggcataatcggaactccccagcttacggactccatagtcttaccggaaaatgtggaatttatgggacaaaaaatcgatctagctcctatcaaaagcttgctcaactctgtacaagacacagcttccactgttgcaaagacgatttcgag

SEQ ID NO: 1282 - DNA, 360 bp, Gossypium hirsutum
  Clone ID: LIB3493-058-P1-M1-E12
caattagtctctttaaggttcattcttaatcagagaataccaatggcttcacatgacaagaaacctactaagccgtcaagcagccgttccggtggcatccgtacgctcgcagatctcaacaggccgtctggacctgattccggcagcgattccgataatcctcaggagtactacaccggcggcgagaaaagtggcatgcttgttcaagatccttcgaagaataatgaagtagatgagattttcaatcaagctaggcaactgggagccatagaacggccaattgaacagcttaatccatcgtcaagttcaacaagttttactggaaccggtagattactttcaggggaaactgtatcttct

SEQ ID NO: 1283 - DNA, 132 bp, Gossypium hirsutum
  unsure (1)..(132): unsure at all n locations; Clone ID: LIB3493-058-P1-M1-E2
tcttcctgaaacacctagacaaactcgtggagggtgcgataaccattgggacaacaaactacngttatcccactcctcatcgcaatcatataattgaccatacccatcatcactatattagtcagaccaaac

SEQ ID NO: 1284 - DNA, 299 bp, Gossypium hirsutum
  unsure (1)..(299): unsure at all n locations; Clone ID: LIB3493-058-P1-M1-E3
tgattctggtcctcatnaactgggaaaggtgactcccgtacatgcacctnaanttctttctcctggtgcttctgttggtcatcattcaaagagaaaagtgactactgcaattccagcatatattcgaatacagactggtgattgtaatgatggtgccccattgatgaaggaaattttctcttaaacctcatcaaaaaccaaagcttgtgaaacttctcggagtgagggcatgaatactcctactgcttcctcactcctattcaaccctacatccttctttgttatatcataaaaattta

SEQ ID NO: 1285 - DNA, 345 bp, Gossypium hirsutum
  Clone ID: LIB3493-058-P1-M1-E5
cggacgcgtgggtttgaacaaagggggctaacacaacctgatataaccagtacatggagagcaatggaggcactttacgactccggaaaggctagagctattggagtaagcaatttctcttgcaagaagcttgaagatctgttggaggtggctcgaattcctccagctgtggttcaagttgaatgccatcctatatggcaacagcctaaactacatgcattatgtaaatccaagggaattcatttaactgggtactcaccgctgggctccccaggcacaggttttgtgaagaaagaagttctgaagaatccagttgcgaatatggtagcacagaaattgggcatg

SEQ ID NO: 1286 - DNA, 214 bp, Gossypium hirsutum
  Clone ID: LIB3493-058-P1-M1-E6
agacaatcttccaccttaacggactggccgctttgtcattggtggccctcacggtgatgctggtcttactggacgtaagatcatcattgacacttatggtggctggggagcccacggtggtggtgcattttccggaaaagatcctaccaaggttgacaggagtggtgcttacattggtaggcaggctgccaagagcattggagcaattggtctt

SEQ ID NO: 1287 - DNA, 187 bp, Gossypium hirsutum
  Clone ID: LIB3493-058-P1-M1-E7
cggacgcgtgggaaaaaggaagccatttatttttcttcagctctaagcgacaagaacaatggctgacttcaagaaagccactgctttgattctcacagtggctttgcttgtgaatctcgctttaatggttgatgctgatggtgatgatgataagaagattctagtcatgaaacataagggtgagaag

SEQ ID NO: 1288 - DNA, 366 bp, Gossypium hirsutum
  Clone ID: LIB3493-058-P1-M1-E8
gcgtattcgagtatttaggcggggtattatagctcataggatgactccactctcttatcttgactccaccatttctaatactaacattccgtgtggatctcagacttgctgaattcgtgtttcactctaagttgtttgtggagtacgcagtcctttctattattagcattgacatttcgtgcgagctccaggtcttctggacatgtgtttcactctaggttgcttacggtacacgtggtctcccttgcgcgagctcattggacgcatgcaaactgggaccgtgacattcgtttggctcatgtgaactaaacctgcgagcttagcttgcgagttgggtcctcgaactccccttgatgtcctctcacg

SEQ ID NO: 1289 - DNA, 332 bp, Gossypium hirsutum
  Clone ID: LIB3493-058-P1-M1-E9
catgactcgctcgttcaggttggtacccatgctcctcttgcttactttatcagccctgactgtccaagaaatttcagctgcaccttcctgcactgaagttgccatagaattactcccatgcctcagcttcctgtctggcaacggtgctgcagatgttccatcgcgggcatgttgtttgggtgctcaaactattgcttacgaagcacagaccaaagatgaccgacgggctatctgcgagtgccttgttaatgcattagcaaatattggcacatctgactccttcactgcgcggatacctttaattgctacccaatgcggtgttgaaggttttc

SEQ ID NO: 1290 - DNA, 371 bp, Gossypium hirsutum
  Clone ID: LIB3493-058-P1-M1-F1
ggtcaaacaggacttatggtgggaagagatatttcaccatttacccagagagagcaaatgaaatccgatggcattgaagagcatttgttaggctataatgatgcttcatccgcagcggattcatcacatatcctagctgggttaggatctaaacttggtggttttgatggatctgctaaaattgggcttcctgaagaggatagtttgcttggtggcagtaatcctttgaaactcctgaatttcatggctggtggtgtaaaagcagagctatcgccctcccaagagacaccaattgatgttgctgagaagctagcagctttgaaggccgttttccaggatgaaagacctgttgtaggagggaaagaagttcc

SEQ ID NO: 1291 - DNA, 323 bp, Gossypium hirsutum
  Clone ID: LIB3493-058-P1-M1-F10
tcaagctatagcattcatggtggattttgtatgcatttggtttcagctggtgtatctgcttctcgtacttgcatttttcagtcatattacatgggctgtcaagggcaactcgctttgcaaacagaccggtatgggggagatcctacctcacagtgtcaccattactgaattcggtgcagttggagatggtgttactctcaatacaaaagcctttcagaatgctatcttctacctcaattcatttgctgataaaggtggggccaagctttttggtccggctggtcggtggttaacaggaagcttcgatcttatcagttacctaa

SEQ ID NO: 1292 - DNA, 294 bp, Gossypium hirsutum
  Clone ID: LIB3493-058-P1-M1-F11
cggacgcgtaggatgaaagaggagggtgtggatgagttccctttctgtgttcacttggtctcttgggagaaggaaaatgtctctagtgaagctctggaagctgctcgtattgcttgcaacaagtatatggccaagtatgctgggaaggatgccttccacctgcgagtccgtgttcacccattccatgtcttgcgtatcaacaaaatgctttcatgtgctggagctgataggctccaaactggtatgcgaggcgcttttggcaagcctcacggaacctgctctagagttcccact

SEQ ID NO: 1293 - DNA, 365 bp, Gossypium hirsutum
  Clone ID: LIB3493-058-P1-M1-F12
gttgccttcaagctccggaccggcccatcttcttgttcaattgccggctgttcatttagctcagagactcagtgagtctaagcaatcataaaaaaaaccaaaaatggtggccgagttgaagtacgagatctcacagaacgcttacataaaattggttctacatgctctgaagcacaagaccacggcggtcaacggcatcttactcggccgagtcaacccacaaaatgatagcgttgttgagatcgctgactcagtccctctatttcactctaatcttgccttgttgccttcccttgagatcgccctcatcatgatagaggagcattatggatctaagggcttgggaattgtgggttatttccatg

SEQ ID NO: 1294 - DNA, 374 bp, Gossypium hirsutum
  Clone ID: LIB3493-058-P1-M1-F2
cggacgcgtgggatggactgcggggagttatactctacatattgctaagtggcgtcccaccattttgggccgaaacacaacaaggaatatttgatgccgtgttaaaaggaaatattgacttcgattcagacccatggccggtaatatctgatagcgcaaaggacttaatacggaagatgttatgctctcaaccttcagaacggctaactgctcatgaagtagtatgtcatccatggatttcccaaaacggggttgccccagatagggcactggatcctgccgtactttctcgtctcaagcaattctcggcaatgaacaaactaaagaagatggctttacgggtaatagctgaaagtctatccgaggaggagatt

SEQ ID NO: 1295 - DNA, 371 bp, Gossypium hirsutum
  Clone ID: LIB3493-058-P1-M1-F3
ctctcccttccttgagaagctggagaagaagggttatgaggtcctttacatggttgatgctattgatgagtatgctgttggacagctcaaggaatttgagggcaaaaagcttgtgtcagctaccaaggaaggtcttaaacttgatgagagtgaggatgagaagaaaaagaaggaagctttgaaggaaaagtttgagggtctttgcaaggtcatcaaggatgtgctgggtgacaaggttgaaaaggttgtggtttctgatcgtgtggttgactcaccttgttgtttagtgactggcgagtatgggtggactgcaaacatggagagaatcatgaaggcccaggctttgagggataacagcatggctgggtaca

SEQ ID NO: 1296 - DNA, 364 bp, Gossypium hirsutum
  Clone ID: LIB3493-058-P1-M1-F4
gctgtttccataagctccaaagggagggataaccatgtcttctgtgattctcctcctcttatccaccgccatcaccgccgccgtcgcttccattcccgcctacccttcagtgtcgacagactgcaccgtttccgccgcggatgataacccggttcccgttcgtcgtgaagtttacggcgacgggagaatcttcgacattagccacagatacaccgtggatatgccttcgtgggggagcaaagatggtctgggtcagttcctttggcttccgtctagcatgaagaacggttcaaggtccaataattccttgatgaagctgcagtcggtccattccggcacccacgttgacgcgccgggacatatg

SEQ ID NO: 1297 - DNA, 360 bp, Gossypium hirsutum
  Clone ID: LIB3493-058-P1-M1-F5
ctatatctaaagggttctttaggtttgcttaccagttccttctgttaagaaaatggcctcccacattgttggatatccccgtatgggaccaaagagagagcttaagtttgctggggaatccttctgggataagaagagcagggcctaggatttgcaaaaggttgctgctgatctcaggtcatccatctggaaacagatgtctgatgctgggatcaagtacatcctcagcaatgctttctcttactatgaccaggtgctcgatgccacatccatgctcggagctgttccacctagatacggctggagtggtggtgagatccgttttctcacttactattccttgtgcctaggtattgcttc

SEQ ID NO: 1298 - DNA, 371 bp, Gossypium hirsutum
  Clone ID: LIB3493-058-P1-M1-F6
gtgcattaccacttcgatctaagcctcaatttcccaatttctcttgaaaccctaatcctaaatcgatttcccaacttcggcgttctaatggccactgaggaaccaactgtcgccgtggaatctgcgcctgagctggcggaagagaatcccgctgaggctacagccaatcccaaatctggcaaagcaaagaaagctaaagagcccaaagccaagaaggctgcagctcctaggaagcgacgagctcctcctgctcatcctccttacgaagagatggtcaaggatgcaatcgttactttgaaggagaagaatggatcaagtcagtatgctatcactaaattcattgaagagaaacagaagaatcttcctggaaa

SEQ ID NO: 1299 - DNA, 368 bp, Gossypium hirsutum
  Clone ID: LIB3493-058-P1-M1-F7
aaaccacccactttacagagctgttggtgatcttcaaatgaagatagggtttggatttgggttggtttgtcaactgtcaaacttatattgtcatatcatactgaagaatctacgaaaccctgatgggagcggaggctatcaaattcctcatggatttctgttcaacattgtgacatgtgcaaactacactacagagatttaccaatggctcggtttcaatattgctacgcagactgttgcaggttatgtatttctcgtagttgctacttctatcatgaccaattgggccctcgcaaagcaccgccgtttgaagaagctatttgacggcaatgaaggaaagcccaagtacccgcgcagatgggtaattt

SEQ ID NO: 1300 - DNA, 201 bp, Gossypium hirsutum
  unsure (1)..(201): unsure at all n locations; Clone ID: LIB3493-058-P1-M1-F8
ctatannnaaagctggtaccccttcacatacccntcccnaattccccggtccacccacccctcctccaagcttctattcatccgcgcgggatctatatctaaggacattcaccttccttcttanttccacgctcaatactaccatcatcctccacccccttcattcatacaccctcatcaattatccaatctctcttttta

SEQ ID NO: 1301 - DNA, 371 bp, Gossypium hirsutum
  Clone ID: LIB3493-058-P1-M1-F9
tgctaagaagcctgaagagggggatgatgaagaagacggggaatggacaccctcaacaattcccaaccctgagtacaagggcccatggaagccaaagaaaatcaagaaccccaactacaagggcaagtggaaggcaccaatgattgacaacccagatttcaaggatgatccagatctctatgttttccccaacttgaagtatgtcggtattgaattgtggcaggtaaaatctggaacaatgtttgataacatcttagttgccgatgatgtagagtatgccaagaaactagctgaagaaacatggggcaagcagaaggatgctgaaaaggcatcatttgaggaggcagataaaaagatagaggtggaggatt

SEQ ID NO: 1302 - DNA, 371 bp, Gossypium hirsutum
  Clone ID: LIB3493-058-P1-M1-G1
ctttcttctctgtattcgatgctcccgtcttttggcctatactactttgttatgggatcgttctcttcgttattacaatgaggcgtctaatcggacatatgatcaaatacaagtatatcccattcagcatcggaaaacgggttcgcctttagtttatactcgtggccaaccaggaaatcttaacaatttttttttcttacagaaatattccggtaagaaaggttctgctagtagcagtggttctcgtgaggattgaatctcagcatacatgatcattgattttcatctttggagaagatgaatttatgctgtttatggattcttttttttttttttaaatatgcagtttattacaaaaacataagttcagt

SEQ ID NO: 1303 - DNA, 362 bp, Gossypium hirsutum
  Clone ID: LIB3493-058-P1-M1-G10
agaagggtcatttaaaagtgcggtaactcgtgaaacttcagttgcttctgtatcaagcacttctgaacaagatggcagtggaaaaggtggggaggaagaagaagatagtgacaacaatgatgcggctgaagctgaggacgcagatgagtctgatttggatttggcatggaaaatgctagatgttgcccgggcaattgctgaaaaacaacagttgggcgataccatggagatagtggatattttatcagctttggctgaagttgccttggaaagagaggacattgaatcttcacttggggactaccagaaagctctatccattttgctacggctggttgaaccagatcaccgtcaaatagctg

SEQ ID NO: 1304 - DNA, 363 bp, Gossypium hirsutum
  Clone ID: LIB3493-058-P1-M1-G11
cgaaaagaatggcaagcgagggagagagcgcggtgaaggagcctttggatttgataaggctcagcctcgacgagcgtatttacgtcaagctccgctctgaccgtgagctccgtggcaagctccatgcttatgatcagcatttgaatatgattctaggtgatgttgaagaggttgttacaacggttgaaatagatgatgaaacctatgaagagattgttcggactacaaagcgcacggttccatttctctttgttaggggagatggagttatattggtttcttcacctctacggactgcttgattatgagatctaagtttctagtcactttttatgggaatgaatcacacgatgaatcctttca

SEQ ID NO: 1305 - DNA, 364 bp, Gossypium hirsutum
  Clone ID: LIB3493-058-P1-M1-G12
ccattttgatttcattctgccggcgggaaaccttatattatataaatatttgactcttgttcttaatcttttctgtatatttttgtttgtctttcttatgggattgatttttatcattatttcaatttccatcgtctgggtagcttctctttggaagattttcttctcccattcaaaacccacatttttaaatgaaggtacacctttgcacacaaaaaatgtcttgctggttgttgcgcaccctgatgatgagtccatgttctttttacctacaataaactacttgactttaaaagggcacaatctttacctattatgctcgtctattggtaacgcagatggcatgggaagcagtagtaaagat

SEQ ID NO: 1306 - DNA, 373 bp, Gossypium hirsutum
  unsure (1)..(373): unsure at all n locations; Clone ID: LIB3493-058-P1-M1-G2
caaaacacccccctccctcttggatcgggatcttcgatatctgggctcatatcnaacaaaaaaaaacccgatcccaatggcttcttcaactggattttcactcaatttctcccgtctttcaacttctttcaagcacaaccaggtacctcatcatgggatctctaatgtcaacttacttagtctcccatctcttagaatccgaccgggacctttgcgcctccgggtttcttgtgcggccaaacccgagacggtggacaaagtttgtagcatagtgaggaagcaactagcactacccgaagattcttctgttaccggagaatctaagtttgctgcactcggagctgattctcttgacacggtccagattgtgatg

SEQ ID NO: 1307 - DNA, 372 bp, Gossypium hirsutum
  Clone ID: LIB3493-058-P1-M1-G3
gtttgcatgaaattgacttctggttggtggattctgctttactaatatctaattgcttcaaagtgcataaggtatgttgtcgagactgagattattttagaaggtttcatcccatggagacatggttgtgaatgagttacaaaccacccccccccccaaatcataaaacaaggatttgaggagaagtgagatgaataataaacttcacctctttacgtgttaactgctttagtgaatttgacctcatatgaagcaatatttgtatgctaaataacaaaattgtatccagctgatgctttcaagcattattgtgatgagtatctagttgatattccccttttacttgccagcagtttattctgttaaaactgt

SEQ ID NO: 1308 - DNA, 368 bp, Gossypium hirsutum
  Clone ID: LIB3493-058-P1-M1-G4
ggacaacccttctcatcccaccgaccagtctcctcatcataaacttggtgggggttgttgcaggaatatcgtatgccatcaatagtggctaccaatcatggggtcccctctttggtaagctattctttgccttctgggtgatcatccatctctaccccttcttgaaaggtttgatgggacgccaaaaccgtacacctaccattgttgttgtatggtcaattctgcttgcctccattttctctttgttgtgggtgcggatcgatcccttcacaaccagagttaccgggccggatgtagaacagtgtggaataaactgttgagggagaacctataaagactgaagatttgttttggtgtcactaagcttc

SEQ ID NO: 1309 - DNA, 370 bp, Gossypium hirsutum
  Clone ID: LIB3493-058-P1-M1-G5
atggaaaacttttgtaaaagacgattcattggttgcaaatgattttttgatcttcaaatacaatggagtgtcccattttgatgttctaatgtttgatggcaagagcttgtgtgaaaaagcttcttcttattttgtgaggaagtgtatgcatacagaatctgatgccactcaccaaactaaaaggaaggtgaatgaaaatagtgatgaaattttgcacaattcttctcaatgtggcctcgaaagcggtcctgaaaaatcgactaacaatgacatggacgcgaggccctcaagaaaacctatcaagtctgcagctagtaaaaagaagatccgaaattcggataatggtactcagtctatccatgcgaagcag

SEQ ID NO: 1310 - DNA, 371 bp, Gossypium hirsutum
  Clone ID: LIB3493-058-P1-M1-G6
cctcagcacactgttactccctgaggtgctgcgcgaaaccctaaagcaatgcctcccaaagcagctaaatccaaggaagcaccagcggagaggcccatcctcggccgattctcttctcatctcaagatcggaatcgtgggactgcctaatgttgggaagtctactcttttcaacacgctcactaagctttcaatcccagctgagaacttccctttttgtacaatcgagcctaatgaagcccgagttaatgtccctgatgagcgattcgaatggctttgccagttgttcaagcccaaaagtgaggtttcagctttcttagaaattcatgatatagctggactggttagaggtgctcatgaagggcaaggatt

SEQ ID NO: 1311 - DNA, 354 bp, Gossypium hirsutum
  Clone ID: LIB3493-058-P1-M1-G7
gtggcctcccatcatcaatcaagagggaccccaccttccaatcctacggcggcaagggatccatcgtggacttgagccataacttcatcacgggggatataacccccttcttggctggggtggagactctcttcttgaacaataaccatctcactgggtctgtacctgaggagtacgtgaaaagcgtgtacgacggcaccaccaaaactttgtatttgcagcataactatctatccggattcccattacctcaaggttccactctgcctgataccgtctccttgtgcttgtcctataattgcatggtgccgcccgttgggatatcagcctgcccggccagtgccggaagccagc

SEQ ID NO: 1312 - DNA, 365 bp, Gossypium hirsutum
  unsure (1)..(365): unsure at all n locations; Clone ID: LIB3493-058-P1-M1-G8
gtcttcttcattctcactctgtgtccactgaactcttgctaaacggtatcgttttagtcagtccttcatcaatggcgaaagaaccggttcgcgtcctcgttactggagctgcaggacaaatcgggtatgctcttgtacccatgattgctaggggagtcatgttgggtgctgaccagcccgtgatccttcacatgcttgatatcccacctgctgcggaggctttgaatggtgtcaaaatggagttggtggatgctgcttttcctcttctaaagggtgttgttgctacaactgatgttgctgaggcatgcactggagtcaatngtgctgtcatgggttggggtttcccaaggaaggaaggaatggag

SEQ ID NO: 1313 - DNA, 369 bp, Gossypium hirsutum
  Clone ID: LIB3493-058-P1-M1-G9
cccgtttgttccaatctccggggttgagggtgacaacatgattgagagatctacaaacctcgattggtacaagggtcctactctccttgaggctcttgaccagatcaccgagcccaagaggccctcagataagccacttcgtcttccacttcaggatgtctacaagattggtggtattggaactgtccctgttggtcgtgttgaaactggtgtcctcaaacccggtatggttgttacttttggtcctactggtctgaccactgaagttaagtctgttgagatgcaccatgaatccctcccggaagctttccctggtgacaatgttgggttcaacgttaagaacgttgctgttaaggatcttaaacgtgg

SEQ ID NO: 1314 - DNA, 372 bp, Gossypium hirsutum
  Clone ID: LIB3493-058-P1-M1-H1
aggttccatcacccaaattcccattttgaccatgcctaatgatgatataacacatcctacaccagatctgactggttatattactgaagggcagatttacattgatagacaacttcacaatcgacagatatacccaccaattaatgtactcccttcactctctcgattaatgaagagtgctattggtgaggggatgactcgtagagatcatgctgatgtgtccaaccagctctatgcaaattatgctatcggaaaagatgttcaagcaatgaaagctgtagttggagaggaagcactttcttctgaggatctgctttatctggagttcctagacaaatttgagagaaaattcgtgactcaaggtgcttatga

SEQ ID NO: 1315 - DNA, 242 bp, Gossypium hirsutum
  unsure (1)..(242): unsure at all n locations; Clone ID: LIB3493-058-P1-M1-H10
ttttaacgtgcagttttgtttggttttttctttcgttcctcttcttcaatttttctttctttcctttgacaattgatgctcttgagatcttaggaattcttgtggtgttttgntctttctctgtattttaagctttctgcttagccgggttctttagagttttgtctgtctttttggccttactaccttgataattcaatttcagattcctttgcttctctttctttcattctttccttctc

SEQ ID NO: 1316 - DNA, 190 bp, Gossypium hirsutum
  Clone ID: LIB3493-058-P1-M1-H12
ggagagccttttttgtgtagcgattctcagttagtcttttctttaagcttacagcttctctccagagttttataatgggtaaggagaaggttcacatcaaccttgttgtcattggccatgtcgactctggcaagtcgaccactaccgggcatttgatctacaagcttggtggtattgtcaagcgtgtgat

SEQ ID NO: 1317 - DNA, 364 bp, Gossypium hirsutum
  Clone ID: LIB3493-058-P1-M1-H2
tcaggaagaaagggttgcctgtgaaagcattggttaggaatgaagagaaggcaagaaagatgctcggtcccgatattgaattgattgttggagacattacaaaggagagcacactggttgctcagtacttcaaaggagtgaagaaagtcataaatgctgcttctgtcattattggcccaaaggaaggggacactcctgaccgagcaaaatacagtcaaggagtcaagttttttgaaccagagataaaaggtgattcacctgaaatggttgagtacattggaatgaaaaacttgattaatgctgtgagggagagtgtcggactacgaacagggaaactgctttttggatttgaagatcatctttc

SEQ ID NO: 1318 - DNA, 372 bp, Gossypium hirsutum
  Clone ID: LIB3493-058-P1-M1-H3
cccacgcgtccgaatacccagagaggatgatgctgactttctcggtcttcccatctcctaaggtctctgatacggtcgtggagccttacaatgccactttgtctgttcaccaattggttgaaaatgctgatgagtgtatggttcttgacaatgaggccttgtatgacatctgtttccgcacacttaagctaaccactcccagcttcggtgatttgaaccatttgatatctgcaacaatgtctggagttacatgctgcttgcggttccctggtcagctcaactccgatctcaggaaacttgccgtgaatctcatcccctttcctcgtcttcactttttcatggtgggttttgctccactcacttttaggggat

SEQ ID NO: 1319 - DNA, 369 bp, Gossypium hirsutum
  Clone ID: LIB3493-058-P1-M1-H4
cccttccacatgccatcctccggcttgaccttgcaggtcgtgatctaaccgatgccttgatgaagattcttaccgagagaggttacatgttcaccaccactgctgaacgggaaattgtccgtgacatgaaagagaagcttgcttatgttgccctggactatgagcaggaactggagactgccaagagcagctcatctgttgagaagaactatgagttgcctgacggacaagtcattactattggagctgagagattccgttgccccgaagtcctcttccagccatctttcattgggatggaagctgctggaatccatgaaactacctacaactctatcatgaagtgtgatgtggatatcatgaaggatc

SEQ ID NO: 1320 - DNA, 117 bp, Gossypium hirsutum
  Clone ID: LIB3493-058-P1-M1-H5
gtttcgaaatggacggggtcaagggtgaagggctgtactgaaagaatctccagttcttcctactatatcagatattaacaacggaatatactgcacatatgagtttaggatgtatac

SEQ ID NO: 1321 - DNA, 369 bp, Gossypium hirsutum
  Clone ID: LIB3493-058-P1-M1-H6
gtcaaataagactcctgagttcatcaagatgaaccctttggggaaggttcctgtgttggaaacacctgagggtccggtatttgagagcaatgccattgctcgttatgttgctcgctcaaaggttaacaaccctatatgtggttctacattgattgattatggtcatatcgagcaatggattgattttgcagccatggaaattgatgctaatattgccaaatggttgtatccaagacttggttacggtgtttaccttccttcagctgaggaagctgctattactgcattgaagagagcccttggcgctttgaacactcatcttgctttcaacacatttcttggtggacatgctgtcacccttgctgacat

SEQ ID NO: 1322 - DNA, 224 bp, Gossypium hirsutum
  Clone ID: LIB3493-058-P1-M1-H8
taacgttcgatcgtttaacgcagacccatttttaagtgagggaaaggtttcagttcagagtcataagcaacatcaatggctccttcaactctgacggctcttgcggaagagaaaaccttgcaggcaagcttcgttcgtgatgaagatgagcgttctaaggttgcttacaaccaattcagtaatgatatccctgtcattctctcttgcttgtatctatgttgttg

SEQ ID NO: 1323 - DNA, 328 bp, Gossypium hirsutum
  Clone ID: LIB3493-058-P1-M1-H9
gcaagctatcttacatacgtgagggggacaacgttcggcacggattaaacaaggatcttggtttcaaggctgaggatcgaacagaaaatattcgcagggttggtgaagtggcaaagctctttgcagatgctggtttaatctgcattgccagtctaatatctccatatgggaaagaccgtgatgcatgccgagcaatgttgccggatgcttttattgaggttttcatgaacatgcccctagcattatgtgaagagcgagatccgaaaggtctttacaagcttgcccgtgctggaaagattaaaggttttactggcatagatgatcctta

SEQ ID NO: 1324 - DNA, 173 bp, Gossypium hirsutum
  Clone ID: LIB3493-059-P1-M1-A1
aaaaaaagccccttgtgtatctgttggttcgcattctgcttttaactactttggtttggactcttcaaaatttcctttttctgatttgagttgggtgtttttgggtttattttttggttgaatttattgtttgcgaaagatagaaatggcaaccgtttttgtggtccatggaa

SEQ ID NO: 1325 - DNA, 156 bp, Gossypium hirsutum
  Clone ID: LIB3493-059-P1-M1-A10
agctactggatttgtgttggaaggtggcttgccatttacttcgctaagggagctttgttgttggacgttggaagactggcaacaggttatggtatgggagtcttttcgtatgtggtaccagtttttatttctgaatattaaccaaacaattttcta

SEQ ID NO: 1326 - DNA, 300 bp, Gossypium hirsutum
  Clone ID: LIB3493-059-P1-M1-A11
attcttcaaaggtataagcattgcctctagccttggcttgagcatccctgaggtcccttaggtacagcctcacaacatgggcactgaaagggttggtctctggttggcctccgttctcctcaaaagctacacggaggcgccctaccacaccatccaagctgctccatgcttggtcgagagggcaagagcatgagcatggcgatggtgggtcaggagggttgccccaaaaaggactagctcctctttggagtttaacctttccctgaccttgaagttcaagaattctagctcattctcttt

SEQ ID NO: 1327 - DNA, 336 bp, Gossypium hirsutum
  Clone ID: LIB3493-059-P1-M1-A12
cggacgcgtggtggcaacgtcaggtggcactgtcactgcttattatctgtcatctcaagggccaacccatgatgagatagactttgaattcttagggaatctgagtggtgacccttacattttacacaccaatgtcttcacacaaggcaaaggcaacagagaacaacagttttatctttggtttgaccctacaagaaacttccacacctattccatcatttggaaaccccaacacatcattttcttggtggataacatccccattagagtcctcaaaaaagcctgaatccattgggggacccgttccccaagagcccactccatgaggattttact

SEQ ID NO: 1328 - DNA, 302 bp, Gossypium hirsutum
  Clone ID: LIB3493-059-P1-M1-A2
ccttattgataatttgagaaggaagtggtagcttatacactgattgggatctcctcccaccaaagaagatcaaggatcctgaggccaagaagcctgaagattgggatgacaaggaatacatccctgatcctgaagacaaaaagccagagggttatgatgacattccaaaagagattcctgatcctgatgctaaaaagcctgaagattgggatgatgaaaaaaaccgggaatggacaccctcaacaatttccaaccctgagtacaagggcccatggaagcccaagaaaatcaagaaccccaac

SEQ ID NO: 1329 - DNA, 246 bp, Gossypium hirsutum
  unsure (1)..(246): unsure at all n locations; Clone ID: LIB3493-059-P1-M1-A3
gggaagtcaaaatngtgatctaagcttggctgcgatcctccggaaatcccacgccgctcgttgtgtcggaacgccggagtttatggctcctgaggtgtatgaagaggaatataatgaactagttgatatatattcatttgggatgtgcatattggagatggttacttttgaatatccatatagcgaatgtactcattctgctcagatctataagaaaagttgtttgggaaaaaagccattaggctt

SEQ ID NO: 1330 - DNA, 230 bp, Gossypium hirsutum
  Clone ID: LIB3493-059-P1-M1-A5
cccacgcgtccggtccgggaaggtgggaggccaaactcctaaagtggccaagcaagacaagaagaagaagccccgtggccgcgcttacaagcggatgcaatacaaccgacgcttcgtcaccgcagtggttggatttggcaaaaagaggggacctaactcatctgagaagtaagagatctatgtaggtgaagaaggcaagaagccttgttgaaagctttgatggattttaa

SEQ ID NO: 1331 - DNA, 296 bp, Gossypium hirsutum
  Clone ID: LIB3493-059-P1-M1-A6
cttggatataggatcatttttggccgggctgcactttgctgtgggcttcgataaccaaccaacagggaacaggaagagatactgaaaaaagacatgaagctatcattcaagctgcaagaagacaagaacccagtcttgaaagccagaatacccattttcatatttagccaacccttcgtttcgagccttactaccaccccttcaaccaccaacgatttcagcggcggcgggagcggtagtggcggcaacaaaatctttcaaaataccttccttttctttttcacgaattttccttt

SEQ ID NO: 1332 - DNA, 127 bp, Gossypium hirsutum
  Clone ID: LIB3493-059-P1-M1-A7
ggaatttgatttagtgagatcggtgtgcatcaactgagccataccatatagtttgtgcttgaagcagtttcaaattcaggttaataccttggaatatgggctcttgaggggggttcactcttatttt

SEQ ID NO: 1333 - DNA, 282 bp, Gossypium hirsutum
  Clone ID: LIB3493-059-P1-M1-A8
tggcaatctatatggccgttcgtgttagacaatgttcgagccgatatgaggatcgcatgggaggaaccgtttggtccggttttaccggttataaggattaactccattgaggaaggtatccaccactgtaatgctagcaactttggactccaaggatgtgtcttcacaaaggatgtcaataaagcaatattgatcagtgatgcgatggagactggtaccgttcatatatattttgtaccagctcgcggaccatatcattttccattttagggttttaaagac

SEQ ID NO: 1334 - DNA, 387 bp, Gossypium hirsutum
  Clone ID: LIB3493-059-P1-M1-A9
cggacgcgtgggtttcggtgggttgcagcagatggcatcatcatcatcggaaaacttggccaacattgaatcgtgggcgtttcgtcccagctttgctgattcttggctctccgaagcctaagctcttaccagagcactccaagactccatctctacttccttctctaactctgattcgcattctctttccccgctcttcaggcttgtcaactctaaccccttaccgacgcctactgctacccccagcgggtcaaacatttcaagctctgaccctgaaaccactgttaaacgtcagcgggcactactcaagcccctttctactggaaaagtctcaaagtctaaacgcaagtgccgtgccttccaggtctttcaaaccactttcataaa

SEQ ID NO: 1335 - DNA, 390 bp, Gossypium hirsutum
  Clone ID: LIB3493-059-P1-M1-B1
cttagctttgttaaggtatcgggggctctgaggatcttcctctcaacatctcaagagaaatgttgcagcagaacaaaatcttgaaggttatccgcaagaatttggtgaagaagtgcattgagctcttttttgaaatagctgagaacaaggaagattacaacaagttctacgaggctttctccaagaacctcaaacttggtatccatgaggattctcagaaccgaaataagattgcggaattgcttcgatatcactctaccaagagtggtgatgagatgaccagcttgaaggactatgtgacccgaatgaaggagggtcaaaatgacatctattacatcactggtgagagtaaaaaagctgttgagaattccccattccttgagaagctga

SEQ ID NO: 1336 - DNA, 264 bp, Gossypium hirsutum
  Clone ID: LIB3493-059-P1-M1-B10
ttgtatcagaggagtttggctgggttcaagttgggccgaaatgtctgcaatgaaaatgctattcaaacattgtgacctaaaagctacttggcaatgaggaccaggctggatattaattctaaaagatacctaaacaaagtttatttgggacattacactatttaacactcccctagatgggtaggcttgattccttcgaaaccacttgacccaagatgtttaagcaaattggggctccctaattatgtcttatttacttgatct

SEQ ID NO: 1337 - DNA, 66 bp, Gossypium hirsutum
  Clone ID: LIB3493-059-P1-M1-B11
tacaatctacttaaaatcacatttcccgccgggtttaaaaaaaacaagaccatcttcacatctttc

SEQ ID NO: 1338 - DNA, 390 bp, Gossypium hirsutum
  Clone ID: LIB3493-059-P1-M1-B12
gaaacttctcttcgcttgttcgctgcaaatgaatcccgagaaacctcccaaacccttatctttttaccctttttcaccttcttctccatcaccaaactaacgtttccgtacacaacgaacagaatcaaagcaatgggtaaagcttccaagtggttccgcagcatcctcggcttcaaaaaatccgacccccataaccaaccttctccttcttcttcaaaaccaacttcccataaagacaaacggcgttggagtttcgtcaaatcgtaccgtgaaaaagactcctccacgaacaatagtaatgcgaagttgccgtcgtcttcgcagcaacagaaagactctgtttccttcgttgaaaggaaaggtgacaatgaagtaacggatcctagcaag

SEQ ID NO: 1339 - DNA, 351 bp, Gossypium hirsutum
  Clone ID: LIB3493-059-P1-M1-B2
ttttgtgtagttttactttgctggtggtatgggattgcaggtgctgcccttggaatgttaagcaccattgcaactgggttggctatcgatgcttatggtcccatcagtgacaatgctggaggtattgctgagatggctggtatgagccatcgcattcgtgagagaactgatgctcttgatgctgctggaaacaccactgctgccattggaaagggatttgccattgggtcagcggcgttggtgtctttggctctatttggtgcctttgtgagccgtgctgctatcacgaccgtagatgtcttgaccccaaaagttttcattgggttaataggttggggccatgcttcctta

SEQ ID NO: 1340 - DNA, 288 bp, Gossypium hirsutum
  Clone ID: LIB3493-059-P1-M1-B3
cggcgattttgcgtagaaatggcagtgtacgtcccccatttgtggtcagtcaagcttggccgtaatcctcaaccaattcatgtacgccgctacgtctcttgaacttgtgcggagggcggtgtctaaagtggaatcgcagcttagatctactcctcccactttgagagcttttgcttcctcagtttctttttggctcaagagggtgcgtgatattgcttttaactaagaaaccaagatctgttattcaaattctggatctacgtctaccttgttgggacttacaaggct

SEQ ID NO: 1341 - DNA, 210 bp, Gossypium hirsutum
  unsure (1)..(210): unsure at all n locations; Clone ID: LIB3493-059-P1-M1-B4
aaaggccagtgtttanactctcttgttaatggacatttggttgtcggttacccattggtctttggttccaagggcgaagaaaggtatgagatttttggagctttttggtgttggagagtggctgcatggatagagggaggattttggacgggtgatatggatcgggaaggaggattccacgggggatcttggtattaccccgttcttggg

SEQ ID NO: 1342 - DNA, 308 bp, Gossypium hirsutum
  Clone ID: LIB3493-059-P1-M1-B5
gggaactgaaaatgagattccggatgtctaacacaaattcaaaatcggatgaacaggttgaagtgaaagaaacaaaagagaagaaagaagaagcagccatggataaagaagatgatggtaagattcaaatgagagaaaaggatgaagaaatgaagtccaattgcttatcatgggtgagaaaaaggcagagaaacaaacacaaatttaccagaaaaattatctggtttcctcttcctaaaggctgctaaagatggtatatatgaacaatgttggtggaattcttgagattcttcatctctcaaaaacaa

SEQ ID NO: 1343 - DNA, 280 bp, Gossypium hirsutum
  unsure (1)..(280): unsure at all n locations; Clone ID: LIB3493-059-P1-M1-B6
cggacgcgtggggcaaagggtcttgtnngttgtaaaagagtgcagccaatcatgaaaagactaagcaagctgaagataaccctgatgtggatttagacaggcttttaccagaggggtttatggagagaaccagagataggggtttggttgtgaagtcatttgcgccacaagtagcagtgtttaacaaggactcaattggtggctttgtgactcactgtgggtgggactcggtattggaagcggtggtggttggggtgcctatgattggatgggtcttata

SEQ ID NO: 1344 - DNA, 214 bp, Gossypium hirsutum
  Clone ID: LIB3493-059-P1-M1-B7
tcggtgaaaagagatttcaggcaagtgggttgattcttcatgcgtccaccaaaatttctcttcttttaccttctaattgttcaatcttttgcctcagagacaatctgcggggaggacaataagcttactgcctatgaaggtctcagggattacaacttccctgctggtcttgttttagctggtgatactagctttgatctagaccttgtaactg

SEQ ID NO: 1345 - DNA, 267 bp, Gossypium hirsutum
  Clone ID: LIB3493-059-P1-M1-B8
ggattagcaacatgtggggaagtggttcaagtggtcaacatgttgagtacgatcaacgtccagatgttttcaggggaactgtacgctatgctagtgtgcatgctgagctggggcgaactggtttcatgagagatgatctggagtctctggctctacacacttatttttctcctccgaggccggttaccttggcacggatatcatggtgaaaacataggcttttttgtttgtaagaagaagatggcaacttctcttataaactttttg

SEQ ID NO: 1346 - DNA, 218 bp, Gossypium hirsutum
  Clone ID: LIB3493-059-P1-M1-B9
agcccagccattacaagtgacgcgctcttggtaccaggggtgctgcaccttggggctctgcacttatcttgccgatatcatacacttacatagccatgatggggggaaagggactgactgacgcttcaaagatagctattctgaatgcaaactacatggcaaaactgttggagaactactacccctgatttttcctaggtgtcaatggatcagttgct

SEQ ID NO: 1347 - DNA, 339 bp, Gossypium hirsutum
  unsure (1)..(339): unsure at all n locations; Clone ID: LIB3493-059-P1-M1-C1
cggacgcgtgggtcattctttggagtcggaatggattttggtgtgtggagtgagaacancanaaacaattataataaatgggatgcgatttctcgctccacaacagagggctacccacgtggatggacggctgtccttctatctcttgataatgttggagtatggaaccttagagtggagaacttggatagatggtacctaggccaagagacctacatgagaattatcaatccagaggaaaatggcaagacagagatggtccctcctgataatggtatttattgcggcgctctgtagagcttgcagaatgaatcacatagctcttctgcattggcattg

SEQ ID NO: 1348 - DNA, 124 bp, Gossypium hirsutum
  Clone ID: LIB3493-059-P1-M1-C10
tcttcctcggactcttgggtgaagggggggcatttaaaccagtgggtaatccatagccttaacttttaagtttttataaagaaattcatgcctatctttcttaaaaaataagtggggggaaaaa

SEQ ID NO: 1349 - DNA, 103 bp, Gossypium hirsutum
  Clone ID: LIB3493-059-P1-M1-C11
ctgatattgtaacagtgggacgattgactatggtgagatggcttgctgctacactgcacataaataagatcgagagagaggaaaacttagttgctgctttctc

SEQ ID NO: 1350 - DNA, 78 bp, Gossypium hirsutum
  Clone ID: LIB3493-059-P1-M1-C12
cggactcttggctaacgcatgggcacatataaagagtggactaaaaatttcctaagtctcaattttcttggattatct

SEQ ID NO: 1351 - DNA, 364 bp, Gossypium hirsutum
  Clone ID: LIB3493-059-P1-M1-C2
gtaatgttcggcattcccggggggggattaagaaaaattgggatttagggtttagggatttcacataatttggattctggaaaatgtctcagactggaaaattgatgccgaatatcgaccaacaaagcacgaagatgctcaatctcactgttctccaaagaattgatgctttcattgaagagattttgatcactgctgctcacgtcaccttctacgaattcaacctcgatagtaatcaatggagtcgaaaagatgtttaaggatctctctttgttgttaagaggaatacacaaccttcggtccaggtcattgtaatgaatcgtcgttacacagataattttatggagaatctattgggggattt

SEQ ID NO: 1352 - DNA, 384 bp, Gossypium hirsutum
  Clone ID: LIB3493-059-P1-M1-C3
ttttaatcagatctcaacaaggggggtatgcttcattatacatccggtggccagtttaccataccaatagtcattcgtgggcctggtggtgttggacgtcaactgggggctgagcattctcaacgtcttgagtcatactttcagtcaatccctggaatccaaatggttgcatgctccaccccatacaatgccaagggcttaatgaaggctgcaatcagaagtgagaaccctgttatcctttttgagcatgttttgctttacaacctcaaggagagaatcccagacgaggattatatctgtaatcttgaggaagctgagatggtaaggtctggagaacatgtcaccattctaacctattcaagggtgagggttcatgtaatgcag

SEQ ID NO: 1353 - DNA, 301 bp, Gossypium hirsutum
  unsure (1)..(301): unsure at all n locations; Clone ID: LIB3493-059-P1-M1-C4
gcttctgctccggtaanaagaggccgcctgctaagtccaaacctgcttctaaggccaatgaagggaaacgtgctaaaacaacttctaaatccccttctaagacaaaggctgagagcggcggctaaaccaaaggctgctcctaaggctaaatccaccgcaactaatactaaggctgtggctgctgtgaagccgaatgcgagtgcattttctaagccaaaaaccgtagctaaatctaaggcgaaaccaaaggaaaagcccggctaaagctttgaggacttctacaaggacttcttctgggaag

SEQ ID NO: 1354 - DNA, 61 bp, Gossypium hirsutum
  Clone ID: LIB3493-059-P1-M1-C6
cacacacttgctaaattgctgggggggtggtttttagggggggtttttttttttttttttt

SEQ ID NO: 1355 - DNA, 247 bp, Gossypium hirsutum
  Clone ID: LIB3493-059-P1-M1-C7
tgcggctttgaaagaaaaaagaaaaaaaaacctctggggagaatgaatttaacaatggactaaccaaaattaaaggagctaaaggagttcattgatcagtgcaaagctaatccttccattctaagcgatccttcactctccttcttccgggactatctccaaagtctcggagcaaatcttccatcttcagctagcggccatgaagccggagactccaaatcgaagagttatgtgatggaggagagtg

SEQ ID NO: 1356 - DNA, 241 bp, Gossypium hirsutum
  Clone ID: LIB3493-059-P1-M1-C8
caaagagagaagatatatacgtaataaaaaagactgggggaaagaacacaactatggctcctcatagagaagggtcagatgcttcagtggaagccatggttgctcgagggggaaaacacccaatttcatcgatccttatcatcattggtatgcaaacagaagctttgccggtggggaataagttccaggtgattggaaacccttattctttatttccaaaaggggtcccgtgggtccatgg

SEQ ID NO: 1357 - DNA, 469 bp, Gossypium hirsutum
  unsure (1)..(469): unsure at all n locations; Clone ID: LIB3493-059-P1-M1-C9
cgacccacttactataaagcaggccgcccgcacttcaccggcccggacttacactgctcgacccacgtgtccgtttaatcattgctgttggaagggtagggtcggtgagatcccatcatgcttggcgtcnttgcccaacttgagagtcttggatctcatcggaaattccttatcgggaaaaatcccagaccagatagggaaccttcaaaagctcaccgtcttaaacttagctgataataaaatcaacggcgaaatcccaagctccattgttcaactttccagtttaaaacacctcgatttaagcaacaacctcctcaccggcgaagtcccggccaactttggcaacctgaaaatgctgagccgtgcattactgagtggaaaccaactcactggaacgatcccaatctccatcagcaacatgtaccggttagccgacttggatatatcgagaaacaaaatacagggtcaa

SEQ ID NO: 1358 - DNA, 388 bp, Gossypium hirsutum
  Clone ID: LIB3493-059-P1-M1-D1
tttaatcattgctgttggaagggtgatcgccggtgagatcccatcatgcttggcgtcgttgcccaacttgagagtcttggatctcatcggaaattccttatcgggaaaaatcccagaccagatagggaaccttcaaaagctcaccgtcttaaacttagctgataataaaatcaacggcgaaatcccaagctccattgttcaactttccagtttaaaacacctcgatttaagcaacaacctcctcaccggcgaagtcccggccaactttggcaacctgaaaatgctgagccgtgcattactgagtggaaaccaactcactggaacgatcccaatctccatcagcaacatgtaccggttagccgacttggatatatcgagaaacaaaata

SEQ ID NO: 1359 - DNA, 218 bp, Gossypium hirsutum
  Clone ID: LIB3493-059-P1-M1-D10
aaaaaatcttccagtttctagtttctcacaacagggcgtgggaatgtcttcttgctgcggaggaaactgtggctgcggcgctaggtgcaagtgtggcaatggctgggacgggtgcgggatgttccctggcataatagagaagactacaactgagactattggtcttggggtggcaactcagaaaatacactttgagggatctgagatgggaggtgggg

SEQ ID NO: 1360 - DNA, 382 bp, Gossypium hirsutum
  Clone ID: LIB3493-059-P1-M1-D11
tttccaatacaaagcttcgtatggtcttttttagttccgacaaaagaaaacgaaaaaaatagaagaaatacaatcgttttctttttgaagtcgggttttagtttttggggagaaaaaaatgttgggagtatttagcagtgcgatagtgtctccgccggacgagctggtggcggccggttgccgaactccatcacctaagataacggcggatgctctggtgaaacggttccttgagacgaactcctccggcgtgtccatgcagatcggagaccatgtccaattcgcttattctcaccataaagagtctcctttacggcccagatcatttgctgtgaaagatgaaatcttctgcttgtttgagggagcccttgataacttgggg

SEQ ID NO: 1361 - DNA, 350 bp, Gossypium hirsutum
  Clone ID: LIB3493-059-P1-M1-D12
cggacgcgtggaaaaatgccagaaaggaatcgaaaagaaaaaaattgaaaaaaatgggttcggttccatcagaactgagcttggattttagacccaaatttatacccaaaacgatcagtaattttctcgaggaaatttcattgatgggaagcgtttccgataaggtttcaaagcttgattcttttgttaaaagattagaagaagaaatgagaaagatcgatggttttaaacgtgaacttcctctttctatgcttcttttgaatgatgcgattttagctttgaaagaggaatttacgcaatgtattagaagaagaaatgttgaacctgttttagagaatttatttccttga

SEQ ID NO: 1362 - DNA, 369 bp, Gossypium hirsutum
  Clone ID: LIB3493-059-P1-M1-D2
ggctcagatatgtgtaacatgcgcctggggtgaaaaggggcacgagactgcgatatactaaaatcggtgaaaagctctttgagatcgatcccgacggaacaggcctggcttttggtgacatgatgaggaagaaaatctccatgccagcacacttgagtggatgatgggcaagatgacaatctttttgataatttctcagctggtgcacagagacttgggggttacactggcagagactatgctgatatactagaggtcctggtgaacaaatggaaggtgatggagttaactggactttcagccgacgggcgtgaaggtcaggattatgtgtgcgggcttccaccaagaattctaaggctggaagagaga

SEQ ID NO: 1363 - DNA, 386 bp, Gossypium hirsutum
  Clone ID: LIB3493-059-P1-M1-D3
cggcgatcaaatccctttcacgagggggagagaatttacgtgagtaactaactcaactttttttcgatgtagttgaaaaagctcatctttccttttttgataattagagggggcactggcttagaatgtgggaattcttgctctggatatctacttccctcctacctgtattcaacaggaagcattggaggctcatgatggtgctagtaacgggaaatacaccattggacttggacaagattgcatcgccttttgtacagaagtggaagatattctctctatgagcttaacagctgttacttcactccttgctaagtgtaacattgaccccaaaacaaattggccggcttgaattttgcagagagactgtgatctacaagagcaag

SEQ ID NO: 1364 - DNA, 386 bp, Gossypium hirsutum
  Clone ID: LIB3493-059-P1-M1-D4
acgggcctgaaagcaccaggagggggcgaatgtatcatggctgggctcttcttttaccggacgggagagtcttgggtgccggcggcaacccttataatacatacacttgcaggaacgttgcttacccgacggagctaagattacaagcttttggccctgattatatggaccggcaattcaatgatttgagacctgggaatgtaacgatagagtatgaggggcattcatctggtggtgcatatgggacagcggttactattcatttctggcttggacgaaggcgcaagtaagacgtggaatatagtgtttatgcgccggcgtgcacgacgcattccatttcaatgaatcaaagggtgctgaaactgaggtgccggcacaaaacaagg

SEQ ID NO: 1365 - DNA, 116 bp, Gossypium hirsutum
  Clone ID: LIB3493-059-P1-M1-D6
tttggatcagatcaaatcaaatctgttcgtttagataaggactttgctttaagaccaaatttttatttttggaacacaaataaagggtctttcttttttctcttttttacaggggg

SEQ ID NO: 1366 - DNA, 324 bp, Gossypium hirsutum
  Clone ID: LIB3493-059-P1-M1-D7
aaaaaagaataaaaacaggttgagttccattctaaggtgtgggtttttgatttgccttttgtgggtttttttttataaaaaaggtgagcaaaaatgtttattgagaatgttaagggggagagaccaaaattggattacacagagaatgaaatttatggtggctacaagtattaaacttcagagcttgttcatgggaacaaaaatggatcctattaatgggttgctaaacctaaaactgataaatatgaattcaagagtgatatctatgtgcctaaaatgggggtgattcttattggatgggggggaaacattggattatttttt

SEQ ID NO: 1367 - DNA, 348 bp, Gossypium hirsutum
  Clone ID: LIB3493-059-P1-M1-D8
gttctcttgttattcggggcagcacctttggtgggtctgacaaacaactcttttgtctttgctttttctattttcttttccagccatcgttatggccgacggcccgcagacccctgcaagtagagcttctgcaaccctctctccaggcttatggtatagatggtcaagggttgctatggtggggttactgcttatgctccaactctactttgttgctagccatataaatgttcatgttccccagcccttggcctctacttctctgagacacaagcattccccacaggcttggtattaaacctttgatcgatgaatatcttgatgagaactcccctctttggtatttgt

SEQ ID NO: 1368 - DNA, 303 bp, Gossypium hirsutum
  Clone ID: LIB3493-059-P1-M1-D9
cggacgcttggtttcaagccggggcctatctgttgaccggcaattaacccctatggctcgtaccaagcaaacagcaaggaaatcaaccggtggtaaagctccacgtgaggaactggctactaaggcggctcggaagtcggctccggcaaccggaggagtgaagaagcctcatcgttttaggcccggaactgttgctctgagagaaatcaggaagtaccagaagagcaccgagcttttgatcaggaaacttccattccaaagggtggtgagagaaatcgctcaagatttcaagactgatttgag

SEQ ID NO: 1369 - DNA, 391 bp, Gossypium hirsutum
  Clone ID: LIB3493-059-P1-M1-E1
gttttggccggggtggtatagggtggggagtcatgattgctccggtctatattgctgagatatcgccaactgttgatagaggctctcttacttccttccctgagattttcataaatctaggaattttgcttggttatgtctcaaattatgcattttccggtctttcagttcatataaattggagggtgatgctcgctgttggaattttgccttcagtcttcataggatttgcactttttatcatccctgaatcgccaaggtggttggtaatgcagaaccgagttgaagatgcgagatctgtgctattaaagacaaatgaaaatgagaatgatgtggatgagaggctctcggaaatagtagcagccgctggaatgtctaatggagagaagaa

SEQ ID NO: 1370 - DNA, 65 bp, Gossypium hirsutum
  Clone ID: LIB3493-059-P1-M1-E10
ctctagggacttggctgctcgctctggctcgagctggcattgttggtctcccctcttaatttatg

SEQ ID NO: 1371 - DNA, 196 bp, Gossypium hirsutum
  Clone ID: LIB3493-059-P1-M1-E11
gcttaacgcctcactttccgttattttcatctcattaagacttgtcggaccaccggtcgtttccccttcctcagatcgttgaaatcaaggagaaatccgaagacctacatgctctaatcagtttgaagggattttgtgaaagctgagaaaaagggtagtaaagatggtgatactgacaatggttgctcttgtctct

SEQ ID NO: 1372 - DNA, 278 bp, Gossypium hirsutum
  Clone ID: LIB3493-059-P1-M1-E12
gtttcgttcaccatttgggagggtccagaaatccgaagaattccacagatcccacagatcccacaaatcccacaaattccactaatcccacagatcccacaagtgccacaaatcccactaatgccaggacagtcgggatgtgagagtggggagtgttaccgtcagggttgcggtgggacttgtgctgagtgtggtcagcccaggtgcgcatcaggatgttgccaggctgaaactgtaaagagcaaagggattgaagaggttttggatagtgaacccat

SEQ ID NO: 1373 - DNA, 305 bp, Gossypium hirsutum
  Clone ID: LIB3493-059-P1-M1-E3
cttcatttaccaaaaaacatgggcggaacattacgttcttctacttctttcatcaaactcaaagaaaccaacaacttcaaaactcctggtgacttcttaggctccatttgttttgctcaaatgaagccatcctgccgaatccgagcaaggaattcgatgtcgatgcaggaagcaccgctggtgcatgggaaaatctcgaccaaggaaaccgggaagttatacagtctaacaatttcccatgctgaaaataactcaaaggtacctggttatgggatggtgccactagacacaataacctctagggg

SEQ ID NO: 1374 - DNA, 78 bp, Gossypium hirsutum
  Clone ID: LIB3493-059-P1-M1-E4
tgttgttggacttttcttttaaatgaacagatattgaaggcacttatttcttcaaagacaaattctaattggcttttt

SEQ ID NO: 1375 - DNA, 346 bp, Gossypium hirsutum
  Clone ID: LIB3493-059-P1-M1-E5
caggagctcaatctccatggggggtggacaagtacgtgtcagagctatggaggaagaagcaatccgatgtgatgagggtcttgcagagggtgaggtgctgggagtaccggcagcacccttccatcgtgcgagttaaccacccaactcgccctgacaaggctcgtcgattggggtacaaagccaagcagggttatgttgtctatcgtgtccgtgtaaggcgtggtgggaggaagagaccagttcctaagggtattgtatatggaaaggcaacaaaccagggtggtacccagctgaaattccaacgtagcaaacgatcatgtgcataggaactaactggcccgaagct

SEQ ID NO: 1376 - DNA, 337 bp, Gossypium hirsutum
  Clone ID: LIB3493-059-P1-M1-E6
aacattcccaatcctttaagagaatggggggaggcatatacactcttccaagccatttatctcctggtgctagagacttgattcctcgtatgcttgtagttgatccaatgaaaagaatgaccattcctgagatccgtcagcacccatggtttcaagcacatcttcctagatatttagctgttcccccaccggatacaatgcaacaagcaagaaagattgatgaggagattcttcaggaagttgtcagaatgggatttgaaaggaaccatctgggtgtatctcttcgtaattgaattcagaatgagggaactgtcgtttactacttactattgggcaa

SEQ ID NO: 1377 - DNA, 185 bp, Gossypium hirsutum
  Clone ID: LIB3493-059-P1-M1-E7
ctccattgcagtttgccagcagtaatggctacatgcatagcagctcgcatctccaggaaggccgcggcctctgctttctccgctcaccggcacgtaatctcatcccgtggggtcgccacggagtctgcgaaaacgatctcgccgtccactgatcgagtcaagtgggactacaggggccaaaggga

SEQ ID NO: 1378 - DNA, 362 bp, Gossypium hirsutum
  Clone ID: LIB3493-059-P1-M1-E8
cccacgcttccgggaaagaggcgcgagaacaggagggggattaaggtacagtgctactccatggaagacactgcaaacttttacatgagaccaatcgagggcttaactggggtactcgatatggatacaaaagaagtggtggaggtatcggatacgggtcggtccatccccatacccaaagccaccaacaccgattatcgtttttcggagcagaagctccagcaggatctcaactctataaaccccatatccattgaacagccaaagggtccaagttttggtatccaggatgaacatttggtgaaatgggcaaactgggaattccatttgaaacccgatccgagagcaggtgtggtgggttc

SEQ ID NO: 1379 - DNA, 55 bp, Gossypium hirsutum
  Clone ID: LIB3493-059-P1-M1-E9
ttcgtttcggtgatctttagttcctgggggggggaactttaggggtgggggcttt

SEQ ID NO: 1380 - DNA, 341 bp, Gossypium hirsutum
  Clone ID: LIB3493-059-P1-M1-F1
gggagctgttcctaggtacctgagacctggaactcgaggctttggggctgggcgtggtaatggtggtgctcctatcggtagtcatcttccacaccagcaaggcacacagcaaaacattggaactattggatcttctttcaacttccctctggagaatccaaatagccagccatccgtgggtggtccattatctcagcctggatttgtcaacaatgtccaagggccgagtcaaactttccgtgatggattttcaatgggaggaatgtcccaggacttcttgggtgatgacttcaaaagccaaggctcacatgtcccttataacattgctgaattttctacac

SEQ ID NO: 1381 - DNA, 286 bp, Gossypium hirsutum
  Clone ID: LIB3493-059-P1-M1-F10
gaagaaatctaatctgcgggggtgtggccatccaccacaccttccacttcttcttcccaacttttatgtcccaaccaacattgattgccgctatttgtgttcttactctgtcccatgtagttcaagcaacaacctttaccatagtaaacaaatgcgattatgtggtatggcctggaattctctcaaacgctggtgttccaacacttgctacaacaggggttaccctccaaagaggtgaaaccaaaaccattaccggccccacatcatggggcggtcgcttttgggg

SEQ ID NO: 1382 - DNA, 222 bp, Gossypium hirsutum
  Clone ID: LIB3493-059-P1-M1-F11
acaaaatcagtgcttcagagaggggctctacaaccatgggtctttcttccccatcattcgccggtaaggcagtgaagttctccccttccacccctgaaatccggggaactggccgtgtttccatgaggaaaaccaccaagcctgctccttctgggagcccatggtacggtcctgaccgagttttgtacttgggtccactttacggtgagtcacccaccttac

SEQ ID NO: 1383 - DNA, 291 bp, Gossypium hirsutum
  Clone ID: LIB3493-059-P1-M1-F12
cggacgcgtggtttacgggatggaaagaatcaggaatccgaaagctgaacctgaagcttataatgaaaggaattatagtatgtttagaatttagaatttgactgactacgacatgatcattttaacgggtgccctccttcccatactgaggagcctccaaaaaagacttctcaaatggggctgggccgtaattaacttgcacccgttggttcaggagggaagtgtttgggcccaaaaggttgggagagggacagcttttgttttttccactgaaaaagcacctgcaaatta

SEQ ID NO: 1384 - DNA, 394 bp, Gossypium hirsutum
  Clone ID: LIB3493-059-P1-M1-F2
ccctggtgttcgattggtgaggccgggccgagtctgcttcatctagacaagcagcttcttgttcagcatcaaatgaggcgattaaggactggcaagatgcatggcatgatgaaagaaaagaaacagagaatcaaggaactgatctgcacgataagttctggcagaagctaaagttgacagctgagaagaaggttggtgcagcagaggcagacaaactttgcaaggcttttcaacacgttcacaggaaacttgtgtacgaggggctgagttttgaagctgctcagaagttcctacactcatgaaactgctgaagagatagtcccttcatggctaatacctgttttatattggtagggtcttttcttcggctggtttttttccccttcttggtatg

SEQ ID NO: 1385 - DNA, 150 bp, Gossypium hirsutum
  Clone ID: LIB3493-059-P1-M1-F3
tcagactcttttgatttatcacagccgcgccttatataacggaggtttcttttctctttctttttttaaatcactaatttcttcctccatatcatctataattatccttcagagtcacaacactttctttttctcccataacttatctaa

SEQ ID NO: 1386 - DNA, 256 bp, Gossypium hirsutum
  unsure (1)..(256): unsure at all n locations; Clone ID: LIB3493-059-P1-M1-F4
actcactcaacattccatttgggatgtgcagctcccaagggaaatattcctatcanaaacatagcggttggcctgcccgaagaggcgactcacccctatgctctcaagggagctttggctgagttcatctcaaccttgatcttctgtttcgctggatcgggctcaggaatggcttttaacaaggtgaccgacaactgggcaacaaccctcggctggcttgtagccgtctgtttagctcatgggcttcggcttttcg

SEQ ID NO: 1387 - DNA, 178 bp, Gossypium hirsutum
  Clone ID: LIB3493-059-P1-M1-F6
gttagaccccttccattggaacgtcgggtagtggaaagggagacaagcaatgtgcccacttctttggtgtaactataaacgatgaacaagctgagtgtgggattgttgggagggtaactccaacagctcagagcaaattcaagttactatattatgagcactacatcaatggtggcta

SEQ ID NO: 1388 - DNA, 273 bp, Gossypium hirsutum
  Clone ID: LIB3493-059-P1-M1-F7
aaaaaaagagttcagctggttgggttttttggctttgattattatatttttttgcaattctgttgttgtgatttgattgatttacgtgttaatcaacgagatttggtggtgaatttgagtgaaatttaagggtatttagggatttgtcgaggctattatgatgctatattcgagaggtacatatatgagagagcagttctaaacaatagactttggacgattacgacttccggggctggaatctaagggaaatgggtgtaccatgacttattg

SEQ ID NO: 1389 - DNA, 236 bp, Gossypium hirsutum
  Clone ID: LIB3493-059-P1-M1-F8
ccaaatcgcacagaaagtgtagggcacacaacaaagcagagagcaaacaaacatttccgatcctaaaaaagttagatcgttgaccatgaactccggcacatccgacgggggatgggcggcgcctggatcgagcgggagggtgagctctacatcgtcaacagacaaaaaatagaagggacgagtgagccgaacgttgatgatactgtggcatgcttactttaactgggtttgcgctg

SEQ ID NO: 1390 - DNA, 226 bp, Gossypium hirsutum
  Clone ID: LIB3493-059-P1-M1-F9
cggacgcttgattcattgaggggggcttaagcttgccatgggactcacacttaaaggatcaaactcaattatccttccatttgtgaacaataagccaccgactaatgaacacactcatgttataataaaacttgtaacttcatacttgaaacatgttaaacatttaagaatcatacactgtagtttccttccttacttactacattgattcccagcaaacaagaac

SEQ ID NO: 1391 - DNA, 392 bp, Gossypium hirsutum
  Clone ID: LIB3493-059-P1-M1-G1
cggacgcgtggggaatctaaacaggtttcttataaggttgtaagggatgacaatggtaatgttaagcttgagtgtcctgccattggtaaacaattcgccgccgaggaaatttcagctcaggttttaagaaagcttgttgatgatgcttcaaagtttttaaacgataaagtaacaaaagctgttgttactgtccctgcttacttcaatgattcccaacggacagcaacaaaggatgctggtcgaatagccgggttagaagttcttcggattatcaatgaacctacggctgcctctttggcatatgggtttgagaagaagaacaatgaaaccatccttgtgtttgatctttgaggtggtacttttgatgtttcagtgcttgaagttggtgatgg

SEQ ID NO: 1392 - DNA, 383 bp, Gossypium hirsutum
  Clone ID: LIB3493-059-P1-M1-G10
cttaaaacaaaaccatgggtcaagaaaagaagctagtccaggacgtatctggttggctaagagtctatgatgatggctcagtcgacagaacctggactggtccccctgaggtcaagttcatggctgaaccagtctcaccccatgaacaattcattgatggtatagccactcgtgatgtcaccatcgatcaaaattcaggcctccgggctcgaatttacttgccggaggaggaaaatcccaagtttccgatcatacttcatttccatggcggtggcttttgcatcagcccagctgattggttcatgtactatcagttttacactagggtagccaaatcgattccagctattgtcgcctcgggttacctcaggccagcacccgag

SEQ ID NO: 1393 - DNA, 262 bp, Gossypium hirsutum
  Clone ID: LIB3493-059-P1-M1-G11
gacacatcggggctatcgcgggcaaacctgttggtggacgtaaaacgaacattgtttgcactattggtccttcaacaaacacaagagaaatgatatggaaattgggcgagactggaatgaatgttgctcgtttgaatatgtctcatggagaccatgcatctcatcagaaagttattgatttagtgaaggaatattatgcacaattcaaagacaacaccattgcaatcatgcttgacaccaagggttcttgaggttaggagtt

SEQ ID NO: 1394 - DNA, 275 bp, Gossypium hirsutum
  Clone ID: LIB3493-059-P1-M1-G12
cccacgcgtcgcaattgggtctcactttttcggatgagaatgggaaccttcccacttgtggaactgatagcttttgcatttggcaattcaatttccgtgagtttaatttaagcgaagatatctttgctagtgattcaatcgagttactgcgccagtgtgggattgatttcaagatgaataacgagaaaggtattgatgtgaagcggtttgatgcgctttttgtgttgtatgatgtttattttattatagtgtcttttgaccctttatttttttct

SEQ ID NO: 1395 - DNA, 395 bp, Gossypium hirsutum
  Clone ID: LIB3493-059-P1-M1-G2
gtcaactccaccatttcctaaggttctctctcaagctctttgcaatcccaaaaggagaaataaaaatcttcttggggaaggacatggcagccgaggaggctcttgacttgtcaactttgcagtctcagctaagtgaaactcatgaaatgtggaaccaggagatggaaaaacaccaatgccaggtagattttttacaagacaaaattatggaggtaaaggcttgcttacagggtccggaggaggaatcaaaggaggtagatgttctttggcgtagggtaaaaactactgcaactttgttggcttacttgaaatcaaaagcaagagtgatggctgttcctgatttagcccataagtcatgcggcatcaaaatattagaaggggtagggctcgtggat

SEQ ID NO: 1396 - DNA, 231 bp, Gossypium hirsutum
  Clone ID: LIB3493-059-P1-M1-G3
gagaatctggaactgctatccgagaggctagcgagccaggatagacctcccctgaaaatacgattaattcggatccgaatgaaagcccacctgcatcgcattgcctgaatccatgttgtatatgggtaagaggccgaccttcttgcttatctcatggatcaattctttgaccggtgaggaccgttatttatgcgtacacagagacaaaatggaatgcaggactaggactgg

SEQ ID NO: 1397 - DNA, 218 bp, Gossypium hirsutum
  Clone ID: LIB3493-059-P1-M1-G4
atcgtttttagcctattttatgcggcaaataagcgatttctttttttcgattttctcactctttctgcggaaattttttttttttttttagatctagaatctgcgatcatggagatggagcgcgtgacggggttccctcatacgcatatggatcgccgaccaagaaagcgttctcgattgggctgggacgtaactcagatgccaccgctggctcatgt

SEQ ID NO: 1398 - DNA, 350 bp, Gossypium hirsutum
  Clone ID: LIB3493-059-P1-M1-G5
ccacaatcgtatgtgataagagcccgatgacaaacatgagacatgagacccgatccttctaatggttacccaggcagaacctacaggttctacacaggggaaaccatttatacatttggagatgggctaagctactccaaaatcacccacgaattagccaaagcacctcgattagtatcaatcccattggaggaagaccatgtttgccgctcatctgaatgtaaatcagttgaagccgtcgaacaaagttgtaaaaacctagcattcgacattcatgtgagagttcaaaacagagggaaatactggggaagccacacggtgttcttgttttcgagtcccccatcagtgca

SEQ ID NO: 1399 - DNA, 367 bp, Gossypium hirsutum
  Clone ID: LIB3493-059-P1-M1-G6
ctataatagatggttatttggcctggcaaataaaatcagagaggtactgaagcttgaccaggaaatgaaggatcttgcaaagctattgattgctgaacagtcgcttcttgtcttcgggagaggatacaattatgcaactgctttggaaggtgctctaaaagtgaaggaagttgcacttatgcatagtgaggggatacttgctggtgaaatgaagcatggtcccttgggcattggttgatgaaaatcttcctattgttgtgattgctacccgtgatgcttgcttcagtaagcagcattcagttattcagcagctacgtgcccggaaaggacacttgatagtaatgtgtgcaaaaggagatgctgtatc

SEQ ID NO: 1400 - DNA, 303 bp, Gossypium hirsutum
  Clone ID: LIB3493-059-P1-M1-G7
cggacgcgtggggattttgcctgatggaactttgagtggtggaataaatcaagagggtatcgatcattacaacagattcatcgatgagttgattgaaaatgacatcgagcctgttgtgacacttctgcactttgatccgccggaagcccttgaaaagaagtatgaaagcttcttaagtcatacaattgtgaatgatttcaaggactatgctcaaatttgttctaaaacattcggagatcgagttaaatattggattaccatgaatgagccactaattatggctaacttgggggattccatggg

SEQ ID NO: 1401 - DNA, 387 bp, Gossypium hirsutum
  Clone ID: LIB3493-059-P1-M1-G8
aaagcgagagtcaattaagtcgatttttttaagaggtgagggaaaaaaaatggaagattcatcatcaaagtcgttcttgagaaagcaatgggatgaatacaaagaattctgggccgatcgatttccgttcactaatgtctattcaagatacatcggccgtgaacagtcccttccttcatggtctgaatccgatgttaacgagttcatcgcttctgatccggtgcatggacccatcttgaagactgccagggaagcagccaacatcgccttatacggaagtgcaatcggagctatcacaactgcaagttttgcctggaaatacttcaagagtttacatggtgctggactgtctttcgtaagaagagccgtttttggttggacatttgg

SEQ ID NO: 1402 - DNA, 200 bp, Gossypium hirsutum
  Clone ID: LIB3493-059-P1-M1-G9
gtgtagggaggctcagttagtcttttgtttaagcttacagcttctctccagagttttataatgggtaaggagaagggtcacataaccctcgtcgaaggcggccatccccactattgctgggatggcacctcttatgaaaacagtctaccccccacagcgtcttgagaagtctgtaaagcccaaagaaacaccacccaaag

SEQ ID NO: 1403 - DNA, 395 bp, Gossypium hirsutum
  Clone ID: LIB3493-059-P1-M1-H1
ggccaacacggtgcaatcaagggagtttgctgcgatccagagaagatgaggggcaagatacgttgcaagggtggcgattccatcaagagcattgagatcaaaccacctccaaagcccaaggaccccgagaattctgagaaggaacctgaaaagaaaacagagaagcctacagagtccgagaagaagtctgaaaagcccaaagaaacaccaccaaagtcaccggcgaaacaggcttctcctccggaaggcttttgttgcacggattgttatcatggtcatcgtggtggcccttgctactttggtggaccacctccgcccccatactattgggccttatggtaggccagtttatgttaactggggcggctgcggcggaagcacctactgttattgtt

SEQ ID NO: 1404 - DNA, 134 bp, Gossypium hirsutum
  Clone ID: LIB3493-059-P1-M1-H10
acgaagacgcgtgtctgacgcgtgggcagactcaacggtttgctttactctttattttctttgctttcctatgtggtatttttaataaaaatggaaactagaagataaaattcatgcaattttttacgttcaaa

SEQ ID NO: 1405 - DNA, 209 bp, Gossypium hirsutum
  Clone ID: LIB3493-059-P1-M1-H11
ggaaacactcctcattttgttgccatgctgcattctgggatggagcctgatgagttcacttacggcagtgtcttaaaagcttgtgctggtcaaaaagccttgaattatggcatggaggtacacaatagaataattaaatctggaatatggtttcattcatttgttgcaaggggctttggtgatatgtactgcaaatgtggggatgattg

SEQ ID NO: 1406 - DNA, 364 bp, Gossypium hirsutum
  Clone ID: LIB3493-059-P1-M1-H12
ttcgaaacctccgaaagcaaaggcatctctaacagctgcaaggacagcggcaaatgcaatttatgtgccaccagcgcaacaaggtaatatagatttgcaaagcggaatcctccatgcagaggaaaaggattacaaaactggttatagctacttctttgaagcatttgaagcattcaatgccctagaagatccccgtgctgtatttagcctcaagtatatgttgttgtgcaagataatggtgagccaggccgatgatgttgctagtataatatcatccaaggcagggctacagtatgtggggcctgaacttgatgctatgaaagctgttgcttgatcccatgccaaacgttccctgatgcttttc

SEQ ID NO: 1407 - DNA, 158 bp, Gossypium hirsutum
  Clone ID: LIB3493-059-P1-M1-H2
caacttttcttttctccaatctgcatgaccactccttagtgtttccatttcgaagtgaatcatggcgaggaagatgttagttgatgaggaaatgaaccaaacgaatcaagaggaggctcattatgatttcgacttggttggtaccggtgccgagagcg

SEQ ID NO: 1408 - DNA, 309 bp, Gossypium hirsutum
  Clone ID: LIB3493-059-P1-M1-H3
atctaaatctggtgagagtatcgttcttttctcctcgattcttctcctcacattcactctctctcctctttttacaaatctaatctttcgttgtctctcttccaaaggctttccatactgcgtttttcataatgtcggagaaagtcttcccttccgccaagccagccgctacggcggttccgcctgctgtcaacggcggagctccagtgaatatgaatggtacaacagccaacggtggcacgtcaaaatcccacctttataagttcatcttctcggttcaccttaccggtcacaactcctattcctgtc

SEQ ID NO: 1409 - DNA, 245 bp, Gossypium hirsutum
  Clone ID: LIB3493-059-P1-M1-H4
ctttctcttaccgtaaatctggtcggtacactcgtgggagttttatcttccctgctgctcagccatatcctcatcgttacttcactgaagaagttgttattcttgatagctattttggcaagcttggcgctggtagcaaagcttacgaaatgggtgggctggataaagagcaatggcatgtttactctgcttttgttgaatctgttaacaccaaagccccttcttacacttttagagatgtgctt

SEQ ID NO: 1410 - DNA, 187 bp, Gossypium hirsutum
  Clone ID: LIB3493-059-P1-M1-H5
aagagaacaagcagtttttttgagtactaaaattttaacgctttcctttccttcgtctttcctttgctttcctctgtgtgatttttaataaaagggaaacgagaagaaaaaatgcaggcaatttctcacgtgcaaaatcttaattcgtaccttataattcgccggtcgaagcctcggcttgataagc

SEQ ID NO: 1411 - DNA, 51 bp, Gossypium hirsutum
  Clone ID: LIB3493-059-P1-M1-H6
ttttattttttctcagaacttggttggtttatggcgatggggttttttttt

SEQ ID NO: 1412 - DNA, 309 bp, Gossypium hirsutum
  unsure (1)..(309): unsure at all n locations; Clone ID: LIB3493-059-P1-M1-H7
ctcatttctgtcggaaatagagtggtaaacatgtccggtggataccctcaacacactcccggctacggttacggttccccaccagctcagtcttacacagccgctccatacacagctggagcaccgccgccacctcaaccgtacggtactccatacgccgctgcaccatacggcgcaccttctgctccctactctgcccctccaggcgagaaaccaccaaaggacaagcaccaagcgcatggcgtcggtggtgctcctncagttcacagcggaagctatcctcccgcaggaggctatgcgagcccgttc

SEQ ID NO: 1413 - DNA, 67 bp, Gossypium hirsutum
  Clone ID: LIB3493-059-P1-M1-H8
gtgagattcaaaattttgagagagacaaagctctctgagcaaattttacggcataatttggaagata

SEQ ID NO: 1414 - DNA, 174 bp, Gossypium hirsutum
  Clone ID: LIB3493-059-P1-M1-H9
ctccccaacaacaactaccgtggggaggcatatctacccctgccacaccctttgaatgcaaccctcgcccccttcctcttctgctttatattctctaatctctttcacctctaacccacaccagggtttttttttatttatagtttaaaactcagcgtgatcttcctttctaat

SEQ ID NO: 1415 - DNA, 332 bp, Gossypium hirsutum
  Clone ID: LIB3493-060-P1-M1-A1
cttcggttccaaattccggttatgcaattttacaaatacaatccttccatgcaaggaaaagaccctgttagggtgatcagggaggcacttgcacaagcgttagtgttttattacccatttgccggtaggctaatggaaggacctcagcgcaagctgatggtggattgcacgggtgaaggtctaatgtttatcgaagcggatgcggatgttacgctcgagcaattcggtgatgtacttcaaccaccattcccatgcttggaggagctcctttatgatgttccgggttctactggggtgttgaattgccccgtaatacttattcaggtaacgcg

SEQ ID NO: 1416 - DNA, 339 bp, Gossypium hirsutum
  Clone ID: LIB3493-060-P1-M1-A10
cggacgcgtgggcggacgcgtggggcattgacggcgtcgtatttgagcttccagagtttcgttgattctggtagccgatatttcagtgcttcatggggtggtatccaatgggaaaaacaagtccgtaactccgctcagatccatcgttccggaggcatgtccgtcctggtgactggagcggctggtttcgtcggtacacacgtttcccttgccctcaaaaaacgcggagatggagtcgttgggcttgacaatttcaacaactattacgacccttcgttgaaaaaagcgaggaaatccctgcttaacagccacggcattttggtggttgaaggcgatttg

SEQ ID NO: 1417 - DNA, 380 bp, Gossypium hirsutum
  Clone ID: LIB3493-060-P1-M1-A11
gttctactaaaggagcaaggagtgaggggcttcttccgtggttgggttcctacccttcttggttacagcgcacagggtgcttgcaagtttggattctatgagttcttcaagaagtactattctgaccttgctggacctgaatattttgccaagtacaagactctcatctatcttgccggctctgcatctgctgaggtgattgctgatgttgcactttgcccctttgaggcagtcaaggtcagggttcaaacccagcctggttttgctaggggtctgtctgatggtcttcccaagtttgtcagatctgaaggtgctctcggattgtacaagggtattgttcctctttggggccgacagattccatataccatgatgaaatt

SEQ ID NO: 1418 - DNA, 380 bp, Gossypium hirsutum
  Clone ID: LIB3493-060-P1-M1-A12
caaggttcttgaaggagcagaccagcgggtgcctgcagaacttcgtgatatggcttcatgtggtggtgggaggggaatgcctagacgttgggctcccagttctggtggccgtgatgaggggcgtggtggacgtgccagttcaggatatggtggtagggaaggtggaagaggtggtcgaggaatttccacatcttcatctagctggcatgagagaagtggaggccgcggatatgatcgtgagtctcgcgacagtcgtggtttccatgatagttatgacaagggaagaagtcgcagtcgaagtcctgcaggttggggtgatcgccataaaactggcgtacgtgatcgcagctggagttgtagtgctgaaaggtatgatagtg

SEQ ID NO: 1419 - DNA, 406 bp, Gossypium hirsutum
  Clone ID: LIB3493-060-P1-M1-A2
cgtccggactccccaggtcggccacgcgtcccaagaaacacagtgcttctcaatgtggagggagaataaacatggcatcaagagtgattacgtatttttccaggttgctattcaatactcaaatgtttatcaagctgatatagggagagtgattactatcagattggcaactgtggatagtggttcggcctatcttcagagtgttcaagatgaggtggctgcagtcataattgccaagaggactctgctgcaagcaaaaagttattctgatgcaattgatatgcagacaacaatagatgagagagttaaagatattgcttcaaaatttgggtctcaagtgccaaagtcaaagctttatctgttcccaaaagaaatatctttactaccagagcttctattccatctt

SEQ ID NO: 1420 - DNA, 378 bp, Gossypium hirsutum
  Clone ID: LIB3493-060-P1-M1-A3
caaacaccttctttcctagaaagggagggctcaagagagagagaccatggccgatcaacttacggacgatcagatctctgagttcaaggaggctttcagcctctttgacaagggtggcgatggttgcattactaccaaggagctggggactgtgatgcggtcacttggtcagaaccctactgaggcagaactccaagatatgatcaatgaagttgatgctgatggaaatgggaccattgattttcctgaattccttaacctaatggcaaggaagatgaaggatactgattccgaggaagaacttaaagaggctttcagggtgtttgacaaggaccagaatggtttcatatctgctgctgagctttcccatgtcatgac

SEQ ID NO: 1421 - DNA, 377 bp, Gossypium hirsutum
  Clone ID: LIB3493-060-P1-M1-A4
gttaaagttagcatagaagtttagaggggttcttacaccttacttctcttctgtctttctctttttcagctaaatctcacttgttgaatagtagaacatggaagggaagatgagttggacggtggcggatgcggtggactacaagggtttccctgctgacaggtcgaaaaccggaggttgggttccggctgcactcgttctagggattgagatctgtgagaggctttcaacaatgggaattgcagttaaccttgtgacatacttggttggtgtactgcatttgccaagttcaacttcagccaatgttgtgacagatttcatggggacatctttcctcttgtgtttgcttggaggcttccttgctgattcattccttg

SEQ ID NO: 1422 - DNA, 380 bp, Gossypium hirsutum
  Clone ID: LIB3493-060-P1-M1-A5
ggtaagaggaccggaatctccaccatggctgacggagccgatgggtttcaaccaagcaacggttttccgcatgaagctgatcctgattcttcaacctctatcgatcctgatcctaccggattcggtgctggcataggtataggttatgaaagaagcccttactgtatcgactgcgacgatgtggatatcatgggcggcagcttttgcggcacctgcaattacggatgcccttaccgcaggttcaataatgggtgtggtggtggtgtcgcttatatggatgaactcaaacgaacgattaaggaccttaccatgaaacttgatgccaatggtcttttagggaaaaagaaggccatgaatatacaagctatggcgccagaatc

SEQ ID NO: 1423 - DNA, 384 bp, Gossypium hirsutum
  Clone ID: LIB3493-060-P1-M1-A6
tgtaaccccatcgagctcagtccatgcttagcggcaatcacgatgccgtcgcagcctccttcagccgcttgttgcagtaagttgaaggaacagcaaccatgcttttgtggttacattaaggacccaactcttaaacagtatatgaacaatcccaacattccaaaggtagctagctcgtgtggagttgcatatcctcctaagtgttaaaatgttgcttcattagagcatttccttcttcaaggactaatatgaataaatgaataattaaatgaaacataagtttatctattattatactcatagtccaaataattttcttaattttaatatatatacatgcataatgattcaaaattcaaataaaggagagagataatgttgaaa

SEQ ID NO: 1424 - DNA, 337 bp, Gossypium hirsutum
  Clone ID: LIB3493-060-P1-M1-A7
aagcgaagcgagacaaagagtggcgacttcagccatgtcggaaaaacgggtcgtcctgctctgcggcgactatgccgaggactatgaggttatggtccctttccaggctgtgttggcttatggtatatcagtggacgctgtttgtcccggcaagaaggccggcgaaacttgccgcaccgctattcatcaactttccggccatcagacctataccgagatccgtggtcacaatttcacactaaatgcatcatttgaagatatagaccatactaaatatgatggtttagttatagccggaggacgagctcctgaatatcttgctatggatgcatttgta

SEQ ID NO: 1425 - DNA, 386 bp, Gossypium hirsutum
  Clone ID: LIB3493-060-P1-M1-A8
atttttgcatacggggatcattggcggcgtgtactcaaataatctgaaaataaccgatgttttgatggaccagaatcttgtagctaagattagtagttacaacctgcccttattagcagagagtgcaggaaaggtagatcacaggacttctgctctaccaaaagactcgagtagcagaacaagggcaagttatgaagataaggctgatgtctatgatttcggagtgattttactagaaatgattctagggaggccatcaaaagccaagagtgaagtcgaaatccttaaaaatcagttacaagcagttgtagcaactgatgatgcaactagaagaagcatagctgatccagcagttcagacatcttgctcggatcagtcattaaaaa

SEQ ID NO: 1426 - DNA, 380 bp, Gossypium hirsutum
  Clone ID: LIB3493-060-P1-M1-A9
ccctgttggtcgtgttgaaactggtgtcctcaaacccggtatggttgttacttttggtcctactggtctgaccactgaagttaagtctgttgagatgcaccatgaatccctcccggaagctttccctggtgacaatgttgggttcaacgttaaaaacgttgctgttaaggatcttaaacgtggttttgttgcttcaaactccaaggatgatccggccaaggaagctgccaacttcacctctcaggttatcatcatgaaccaccctggccaaattggaaatggttatgccccagtcctcgactgccacacctctcacattgctgtcaaattttccgaactgttgaccaagattgacagacgatctggcaaggaactcgaga

SEQ ID NO: 1427 - DNA, 383 bp, Gossypium hirsutum
  Clone ID: LIB3493-060-P1-M1-B1
tcttatttgaaggtaagagtcacgtgcgtggggtgggatattcttatttgtttgtgttaggacatagatggatggtgcctatttcaatgttaaatttctcatttgtttacttcatcagaactgatgttacgtactggatgtaacttgtaaccatttattgtgctgcagatggtttatctatatgttctcagttttgtgcggatacatgtttcttggattgtggcttatgacagcttgggagttatatttattacttacattatgaagttcccatgtgttagttatcaattttaaaacttctaaagtccattttcggttattatctgtaatttgtgtttgtgtatcatattttcctggttagtcatgcaattgaattgttgact

SEQ ID NO: 1428 - DNA, 373 bp, Gossypium hirsutum
  Clone ID: LIB3493-060-P1-M1-B10
ggaaaacaagggaagaacagcggcgaagaacgagtatgaagatttgttacctgtgatggctgaaaagcttgacgtggaagcgtttgtttccgagttatgcggtgggtttcgtctactagcagatgaagatcgagggttgataacagccgagagtttgaagaagaactctgcacttttaggtatggaagggatgagcgaagaagaagcttgggatatggttaaagaaggtgatcttgatggagatggcgcattgaaccagaccgagttttgtatccttatggttaggcttagccccagaatgatggaagatgccgagacttggctggagaaagcgattgatcaagagttaaggaaaaaaacctcagcttgatct

SEQ ID NO: 1429 - DNA, 375 bp, Gossypium hirsutum
  Clone ID: LIB3493-060-P1-M1-B11
taaagatgataaacatagaagaaatgaaggtgatgatgatgatgatcatggtacacaacttgtatcatctggttcatattatcatttccaaccttctaatttccctttatcatcacatttagcaagccatggatttgcagtgcatgcgccccaggttgataatttcaacgttgtggcagcaccattgccatcggcattatcactatgtccattaccaccgccgcagccaggaggcggagcaccacccttgtttccgcctcatgtggtggatcctagacaacaagttaaccattttcagatgctgagttcaggtgcacaacagaacctcttgcttaattctctcaactttccaccgataacccaatcttttagacc

SEQ ID NO: 1430 - DNA, 326 bp, Gossypium hirsutum
  Clone ID: LIB3493-060-P1-M1-B12
attattttgagagtggacgggatggcggaaataacagtgcagaatatgtaagtgacataataatcaaacatgcagaccgagacaatctatggtgtccagaaactggagaatacttgtacgggttatattgaatcactcaggatccaaaatatcgagaatggggttggcggatctttgagtcatttgagagatacacaaaggtcgaatacggcggatactctactttagatgatgtcaccacagttgctacttcaaaaagagacaggatggagacatttttcctgggtgaaacattgaaatatatgtacttgctgttcggagatagc

SEQ ID NO: 1431 - DNA, 375 bp, Gossypium hirsutum
  Clone ID: LIB3493-060-P1-M1-B2
ctttctttcttgcaatatcgttcggatgggcatgtgcctcataaaattctaaatctcctcctcgtgggcgtaatcggcggcttcttcttcggcggcgtttcaaagccaggcgaattctcaaaccaatataaataccaataaattagaaataaaatattataaactggatcaagagggctggcggagctcgcatcagcggacttatcaacaacaatggaattagctgcattaaacttagttaatgccactttaaattggatcacttttgctttggatgccccttctgcacgagctgtggtgtttggagttcacataggcgggcatttatttgggggaggtcttcttttggtgggcattctctttctgctttcccag

SEQ ID NO: 1432 - DNA, 362 bp, Gossypium hirsutum
  Clone ID: LIB3493-060-P1-M1-B3
aaacatgccacactcttctcattggcggagggctgagcactgaagaagaaaaagtatcatagatcggcaacgtaacagtgaaactcgggggaaatggcgttggctttcaacgagtaccgtaggccattcattatacttaaagagcatgagcacaaaacgaggctgagctggctctaagctcaaaaagccaacatttccgtaggcagagcgggctctcggatcctccgaacctttctaggacccaaaggcatggataagatgctccaaagccccgacggcaatgtcaccatcacaaacgatggggcaacaatattggagcagatggatgttgacaatcaaattgctaagttgatggttgagct

SEQ ID NO: 1433 - DNA, 341 bp, Gossypium hirsutum
  Clone ID: LIB3493-060-P1-M1-B4
ggggaaggcagtgccacaacagggggtagttggggttgggtcgaggcccattgtcccttctatcacaaacccaacatttttacaaatctacattctcatactgcttgcctagctttaggtcaccaaacttttctgggtcattgagacttgggcctaaagggcagcctattaggatcaaatacacccaattgttgaagaaccctagaagaccctcactctactttgtgaatttgattggaattagggttggaaggagggttgtcgatatcccaccaaaggcattggctttcaacccttccactggtgctgggaccatctttgattctggtactggtttcacc

SEQ ID NO: 1434 - DNA, 385 bp, Gossypium hirsutum
  Clone ID: LIB3493-060-P1-M1-B5
aaaccatctctacaaacccatatggccctttgaagaagatgcagatctttgtcaaaacccttaccggcaagaccataacactcgaggtcgaaagctccgacaccatcgacaacgtcaaggccaagatccaagacaaggaagggatcctacccgaccagcagcgtctcattttcgctggcaaacagctcgaagacggtcggacccttgctgattataacatccagaaagaatccaccctccacctcgtcttacgccttcgtgggggcatgcaaatctttgtcaaaaccttaaccggcaagaccatcacccctgaagtcgagagttccgacaccatcgacaacgttaaggccaagattcaagacaaggaaggaatcctacctgacca

SEQ ID NO: 1435 - DNA, 381 bp, Gossypium hirsutum
  Clone ID: LIB3493-060-P1-M1-B6
gtggaagctctcaaatctcagctgctatggcacccatcgcacggttacttttgctcgcgcttctctcaactgcactcacgatttcatcagggtctggggatgggtacaccatcaatggtcgagtgaagatcccccaaggtctgggtacaaaagggtttgctttgcctggaaaaacgtcaaatgtcaaagttatactcaatggtggccaaattgttacttatctgagacctgatggatatttttcatttcagaacataccagcagggactcatttgattgaagtggctgctattggctatttcttttctcctgttagagttgatgttagtgctagaaacccaggcaaggtacaggctgcattgacagagaacaggaggggtc

SEQ ID NO: 1436 - DNA, 339 bp, Gossypium hirsutum
  Clone ID: LIB3493-060-P1-M1-B7
aaattcttcaaatatcccggctggtcctttcgaaaccaatcatcaccacaacgaagggttcatcgacccacgccggttatatccgatgggcgaatttcatgaccccggagtgaatccacagagacccacgaggagtagcatgagtagcacggtggagtcgtttagtggacccagaccggcctaaccaccgcaaaagtcggcggacttcgcggtggtttcgactaggaagtactatccgaggccgccgccagtagagccagaggattgtcatagtgactgtgattcatcatcgtcggtggttgatgatggggatatcgcgttgtcttcgtgtcggaaaac

SEQ ID NO: 1437 - DNA, 310 bp, Gossypium hirsutum
  Clone ID: LIB3493-060-P1-M1-B8
gagaaattgtgtgtgtcaagagtgctgccaccaaaggatgcggttatgtactgttcgcgaacaggaattctgctgaagaagccatactgaggatgcaggggcaaatgattggtcaacaagttgtccaaattacttggggtaggatcccaacagcaaatcaggacctacctggtagctggggcgcacaaatagatcctaatcagtggaatgcttattacggttatggacaaggctatgatgcttactcttacggggctacccaggatccctctctctatgcgtatggagcatatgccggatatgcacaata

SEQ ID NO: 1438 - DNA, 368 bp, Gossypium hirsutum
  Clone ID: LIB3493-060-P1-M1-B9
cgcatttgttgaggagatgaaagggcaagaagataatgtttattggggactccataagtataaaccaatggcaatctctgttatgcatgcttcacgctgcagtgcctgctacatctggtataatcacacgagacttgcataatcacactgtttccactgttactttcaagcattataaggtatccgtgatgctatttcgttcgttgtacttagtagacgttgataaggaaacaattggcagagttctgaaattgaattctgtaaggaatggaaatctatggaaagaaattgatgttttgatattcaacacttggcattggtggcactcgagaggactgaagcaacaatgggattatgtgcaatttgat

SEQ ID NO: 1439 - DNA, 376 bp, Gossypium hirsutum
  Clone ID: LIB3493-060-P1-M1-C10
tgccgaaagaatatattcctggagtgatgaaaggactggaggagtgtatgtgtaatggtgtacttgcaggttttcctgttgttgatgtacgtgccgtgctagtagatggttcttaccatgatgtcgattctagtgtcttggcatttcaactggcagccaggggagccttccgagaagggattagaaaggctggccctaggatgcttgaacctataatgaaagttgaggttgtcacacccgaagaacatttaggtgacgtgatcggtgatctcaactcaaggagaggccagattaacagctttggtgataagcctggaagactcaaggtggtggatgcccttgttccgcttgcagagatgttccaatatgtcagcac

SEQ ID NO: 1440 - DNA, 347 bp, Gossypium hirsutum
  Clone ID: LIB3493-060-P1-M1-C11
cggacgcgtgggcggacgcgtgggtggacttcaggtgctctgatgtgtcctccaccgttgatgcatcactcaccatggtcatgggagatgacatggttaaggtgattgcttggtatgacaatgagtggggctactctcaaagggttgtggatttggctgacattgttgccaatagctggaagtgacttcaatgtgctatacatacatatatgcataacaatgtcaccgatggttgatttttgcatgctcacttcatttttattctttcggcttcagcaatttctcattttgtcaaggctactatataatctgtaatgtaatgttggatacatacattctctaatatg

SEQ ID NO: 1441 - DNA, 355 bp, Gossypium hirsutum
  Clone ID: LIB3493-060-P1-M1-C12
gagaatgtgaagaaggcgcaagatgctttgctcgttaggtgcaaggctaactcagaggccactttgggtacatacaagggtgatgctgagctttgtgagggtgctgcagagagccttcatgtcaaagactacaaatattaagaaattaggcttgtagtcaaatatgtgatgtttagaggagtaaatttcggtattgatattagggttctagtgtttttttcttcttcttcttttgagcttctgtcgttgctcatcgaatttagtctgtggaatcagacaaattacaaataaggtttgggaccctgtgtgctcgttgagtatttttgggtttctggttatttcagtttaaaacaaa

SEQ ID NO: 1442 - DNA, 387 bp, Gossypium hirsutum
  Clone ID: LIB3493-060-P1-M1-C3
agaaaaagcacggttgcaagcagaggcgcaaagccgcggaagaggcaaggagaaaagctgaagctgaagctgctgttgaagccaaaaggaagagggagctggagagagaagcagcacgtcaggctcttttaaagatggagaagacagtggatatcaacgagaacagtcaatttatggaagatctagagatgcttactacgaccaatgatgaaactttgcctgatttcatggaggagactagcccaagtcattctcaaaatgagttgggaagtttcaaactccggggagtaagtaatcccctcgaacaactaggtttatacatgaagccggacgacgatgatgaagatgaacctcctcaaagtgctccagagccagtaaatgatgttg

SEQ ID NO: 1443 - DNA, 374 bp, Gossypium hirsutum
  Clone ID: LIB3493-060-P1-M1-C4
ggatacctctcaaggagtttgggtggggagaaagcaacagatattagacttgcatctattgctgtcggaacagctagtcgtggaggattggggaaacttttcattcgaggaagcaagtccaggcatggagtaactactgttggcctcagagccatttcccgcgggtgcccttctttaagggttctttccttgtggaatttgtcttctgttggagatgaaggtctttgcgagattgccaacgggtgtcaccagctagagaagcttgacctttgccactgtccctcaattactgataagtctttgcttgctgtagcaaagggctgccctaacttgactgatctgactatcgagggttgtgcaaacattggaaatga

SEQ ID NO: 1444 - DNA, 378 bp, Gossypium hirsutum
  Clone ID: LIB3493-060-P1-M1-C5
ggggagggacggcaagctcgtggcggggactatgtacaagtaaactatgtctgccgacgatcaaatggatatttcgttcacaggttgaaaacttgaaatcacaaaaatcctgaacttaactaatgtggagtttcttttatcaattcaccacttcattagttgaaacacatgatgtttgatccagtctgacctgcctctgttctgtgggaaacttaacagcactgtggatcaattcagtggagaaagctctcctgtcacccttcctttggatgagaactaggtgtgttcctgtttccgttaatgtcgataccatagcatcatcactatgttgttgccaactacattctttcacttgagcaagataatttccaatcattc

SEQ ID NO: 1445 - DNA, 386 bp, Gossypium hirsutum
  Clone ID: LIB3493-060-P1-M1-C6
cggacgcgtgggcttggtaaagagagtggattgagctcttctttgaaatagcagagaacaaggaagattacaacaagttttatgaggcattctcaaagaacctcaagcttggtatccatgaggactctcagaacaggactaaaattgccgaattgctccgctaccactccaccaagagtggtgatgagctgaccagcttgaaggactatgtgaccagaatgaaggagggtcagaatgatatctactacatcactggtgagagtaaaaaggcagttgagaactctcccttccttgagaagctgaagaagaagggttatgaggtcctttacatggttgatgctattgatgagtatgctgtcggacagctcaaagaatttgagggcaaa

SEQ ID NO: 1446 - DNA, 327 bp, Gossypium hirsutum
  Clone ID: LIB3493-060-P1-M1-C7
gtttttaagccggaccaaggcttgctatttcctcgatgtttacccttatttcccttggtccaccgactccaataacattaacctcgattacgcgcttttcgaatcccgaacgataaaatacaccgacccggtttccaatctaacctacagtaatttgtttgaccagatggttgactccgttattttcgcaatggaaaaactcgggtatccggatgttcggatctggatagcggaaacaggttggcccaatgccggcgatatcgatcaaataggagccaacatttacaatgccgctacttacaacagaaatgttatcaagaaactaac

SEQ ID NO: 1447 - DNA, 378 bp, Gossypium hirsutum
  Clone ID: LIB3493-060-P1-M1-C8
attttcttcttcccatgggttcctccacggttccgatcggtgttgctgtctctgccccttcttcttttcttactgatcggaaaacatccgttagattttcggaatttcgtggtctcaagattaaacccaggttggcgtcgctggctcagtcgaccagatcggctattcacgaccggcgtcgagtctgacgtgttgtttgtgaggctcacaacaccgctgttgatgtgccagcaattaaggatgaaacatggcagtcactagttcttgattgtgaattgcctgttctggttgaattttgggctccgtggtgcggaccttgccgtatgatccaccccataatctactagctgtctaagcaatatgctgggaagctcaaat

SEQ ID NO: 1448 - DNA, 367 bp, Gossypium hirsutum
  Clone ID: LIB3493-060-P1-M1-C9
cacaaaaccaaagctcgacgagaggaatgggcaagtgaaacacaaggattttttaagtacgttgatttcattggagaatgttgatggcgctgaaggtggaaagctctccgacactgagatcaaagcattacttttgaacatgttcacagcaggaactgatacatcttcaagcacagttgagtgggcaatggctgagctaattcggcatcccaacatcatggctcaagttcgtaaagaattggactcagtcgttggtcgagaccgcctcgtctccgacttggacttgcccaatctaacctacttccaagccgtcatcaaagaaaccttccgccttcacccatccaccccgctctccctccctcgtatg

SEQ ID NO: 1449 - DNA, 314 bp, Gossypium hirsutum
  Clone ID: LIB3493-060-P1-M1-D1
actgaccaagggcattgcatctgggggactgctagacactgaaagtgctgaccctactgaaattaacgcatgttagtcacaggaataggctgaagaagcttgcttccaagaccatggcaaggcggtaatgactaacaagctggacattggaccagcatgttgcaaatcaataacagctatcaaacacggtcggtcgaataggtaaactgcacacttcgatgttgacttaatcggcctttacatcaccgaacttcgcgctgctgctccatctctcgcacttgttttctaggattttgtatatctagggataaaca

SEQ ID NO: 1450 - DNA, 370 bp, Gossypium hirsutum
  Clone ID: LIB3493-060-P1-M1-D10
cccatcttgaatccaaacaaatgaaaagtaaaacacctctctcattctcatatctttaattgtttgaccagatggctcttctaattaacgaagtcgactcccttactaaccagatcttctccatccttgaaaacaaatttcttttcggtgatcacgagaataatgctgctgcaaaaacccatgaagaagatcacttgaaatctggaaatcagatttccgggaaagtaagaatcctatccattgacagtgggagcttttccgatggtatattggccgcccaatccctccttaccctccagacttttctccgtcaaaagtccgggaatcccaatgctgtcattgcccagtatttcgacgttgttgcaggctc

SEQ ID NO: 1451 - DNA, 370 bp, Gossypium hirsutum
  Clone ID: LIB3493-060-P1-M1-D11
ctttgggtttgaaacaatggaggccaacaccaaaatgtcagctcttcttttgatttgcatgcttttcatttcttcagtgacaccaattcttgggtgtggttcatgtgggaaagcacacaagcatcgaaagcctaagggaaagtcccctaaaggtcccatcactttgcctccccttgtgaaacctccaatcaagttgccaccggttgttcctccaatagttaagccacccattgacctccctccggttacggtccctccaattaaccttcccccagggactgttcctccagtaactaagccaccaagtgggaaactctgcccaacaccaccaaccaaggacacttgccctattgacacactgaaaatgggt

SEQ ID NO: 1452 - DNA, 325 bp, Gossypium hirsutum
  Clone ID: LIB3493-060-P1-M1-D12
cttcgtcggcggacttcgaaaaccaacgtcattcgaacacgagcattcactggcgtgatttctttcggacgcggaaaaagagacaaggagtttcttctcaaggcttgcctataaaaccgaagctcactcgaagaaagaagaaaagaatcaaaggtgacgttgttccacaaatttcttcgtctcttgatgccgaactgtcctgttttaaatcttcctggaagaacttctcgttatcggagcttcgggaagcgaccgataacttcagtcgcgaaaatttgataggagaaggagggtatgcagaagtttacaaagggagattgaaaga

SEQ ID NO: 1453 - DNA, 379 bp, Gossypium hirsutum
  Clone ID: LIB3493-060-P1-M1-D2
aagagatcttatcaacatcctggaggaggccattaggagcggatacccaattttgataattgctgaagacattgaacaggaagctttagcaactctggttgtgaacaaacttagaggtgctttgaagattgctgctctcaaagctcccggcttcggagaacgcaagagtcagtatctggatgacattgctatccttactggaggtactgttattagagatgaggttgggctttccttggacaaagctagcaaagaagtcttgggtcatgcctctaaagtggtgcttaccaaggatacaaccaccatcgtgggtgatggaagcacccaggaagcagtgaataaactattgtacagattaaaaatctcattgaggctgcag

SEQ ID NO: 1454 - DNA, 379 bp, Gossypium hirsutum
  Clone ID: LIB3493-060-P1-M1-D3
gtttgagggatgctaagatggatgagagcagtgtccatgatgttgttcttgttggtggttccactcgtattcctaaagtgcagcagttgttgcaagacttcttcaacgggaaggagctctgcaagagcattaatcctgatgaggccgttgcttatggtgctgcggttcaggctgctatcttgagtggtgaaggaaatgagaaggttcaggatctattgcttttggatgtcactcctttgtcccttggactcgaaactgctggtggtgttatgactgttttgattccgagaaacactaccattcccaccaagaaggagcaggtgttttcaacttactctgataaccaacctggtgtcttgatccaagtttatgagggtga

SEQ ID NO: 1455 - DNA, 355 bp, Gossypium hirsutum
  Clone ID: LIB3493-060-P1-M1-D4
attctgcggcggctcacggtaacaagagctcccttcccctctctttctctccggcggcgatctcaaatcaccggtaaatcgcaccgtaacgcctgattactcgtcacctctgtgatctccgctgacacctcgtggtttcagtttattctaactcgtcgccatcatgaatcccgaatatgattatctgtttaagcttttgcttattggtgattctggtgttgggaaatcatgtctacttttgaggtttgctgatgattcatatctggatagctacatcagtaccattggtgttgactttaaaatccgtactgtggaacaggatggaaaaaccatcaaactccaaatttgggacact

SEQ ID NO: 1456 - DNA, 375 bp, Gossypium hirsutum
  Clone ID: LIB3493-060-P1-M1-D5
ggaatcgtggaagagtggaggaggacgtcgcatcaagggacagggatgattatagtgattaccgccatccggattattgattggttttagctacaacgatgatgatggggtagttgaacttgtgggtaataaagggtcaaaatcatattcagctatggcggttcagaaatgctttggattatcatttcttacctgccggtgatgctggaaaggcattttcatgtcatttgtctgtaccaagcttcagtcttgaaggtttaatggagtaaaactgagctgaaccaatttactgcccgtgggtcctcattagggtaagtcaagttatgttttctatgagatagaaggggttactgacctcattaaggcatttttcat

SEQ ID NO: 1457 - DNA, 367 bp, Gossypium hirsutum
  Clone ID: LIB3493-060-P1-M1-D6
ttttcttctcttcaacccctcctgctgagaatgcaccaatttccggtgcttcctagcctcatcgcagtgtctgtactgctgatggtaactccagtcattgggtaccgtccatggcctcacttaaaacccaacagctccgatttaacgttgggaagctccaagaaattcgagggctcatcagagttcgtccaaatgagataccatatgggaccagttctcaccgccaacatcaccgtacacatagtttggtacggccgatggaaaaaatctcagaagaagatcatccgtgagttcatcaactcaatctccgccgttgatgccaagcacccttctgttgccggctggtggaagaccgtacaactttata

SEQ ID NO: 1458 - DNA, 327 bp, Gossypium hirsutum
  Clone ID: LIB3493-060-P1-M1-D7
gcagattctaacttactggagagaaaactgaagcagatgagaattttagaaaatgttgagctgccggctgcattttctgatttactagttaaacccaagaaaagtcctgttgctgttcctagtgatgaatttggagaatccgaagaggaagaggaagaagaagcagaagcagaagcagaagcagaagaagaaaaggaagaagaaaaacttaagcctgctggtggaaaaattaaatctgtaaaggaaggtactcaggggaagaaaaagaagatcccagaaccagtaccggagccttcaaagctggttcgtatggctaacctatgtgtt

SEQ ID NO: 1459 - DNA, 380 bp, Gossypium hirsutum
  Clone ID: LIB3493-060-P1-M1-D8
ggagaatttagttgctgacatcagaagtgatatccagaattgcttttggtagcagttatttggatggggaaaagatttttgacatgttgatgaagttgtctgtcataacaaacagaaacatgtttaaggctagacttcctgtcatcagcaagttctggaaaagtgctgatcaaattgaagcagacaaacttgagaaagagatacacaattgcgtgatgaagatagtgaagaaaagagaagagaaagtagctaatggaggagccaacagcttcggcactgatttttttggattacttttaaatgcttaccatgatacagacaagaaaaacaacatttcacaacaagaactggttgatgaatgcaagacattttactttgct

SEQ ID NO: 1460 - DNA, 379 bp, Gossypium hirsutum
  Clone ID: LIB3493-060-P1-M1-D9
tggggctcgtcttactgaggttaggaagaatggcacctgcccctggctaaggcctgatggtaaaacccaggttactgttgagtactacaatgacaagggtgccatggttcccgttcgtgttcacactgtcctcatttccacccaacatgactaaactgttacaaatgatgaaattgctgctgacctcaaagagcatgtcatcaagcctgtcatccctgaaaagtacctagatgagaaaacaatcttccaccttaacctatctggccgctttgtcattggtggtcctcactgtgatgcaggtctcactggtcgtaagatcattattgacacctatggtggctggggagcccatggtggcggtgctttctctggaaaggac

SEQ ID NO: 1461 - DNA, 210 bp, Gossypium hirsutum
  Clone ID: LIB3493-060-P1-M1-E1
cccaatctctcaaatatggatcgagccagattcgtaatcgacgccgtcgaagccgagcaaatggccaaacaatcaggcaagacggtgctccaactccttccttctttggtcaaatcagcccagtccgttgcccgcccgccgatctcgaagtaccaagttggggcagtcgggatcgggtcatccggtcggatctttttcggagccaattta

SEQ ID NO: 1462 - DNA, 294 bp, Gossypium hirsutum
  Clone ID: LIB3493-060-P1-M1-E10
attcttccttctgacccctgtggacgtgctgtcgctcggttttgggctgcatatcttgacgacaagtggttcccagcggtgaaaagtataggagtcgctaaaggagaggaagcaaagaaagcagcaatagcgcaagtggaagaagggttggctttgatggaagaagcatacgacaagtgcagcaaagggaagggttactttggtggggatgaagttgggtaccttgatatagcttttgggagcttcttgggatggcttagagtgactgagaagttcaatgcgatgaagctgctg

SEQ ID NO: 1463 - DNA, 286 bp, Gossypium hirsutum
  Clone ID: LIB3493-060-P1-M1-E11
gtgaggaaaaagaagcttcaatctttggttgttaagtgggtgaaacaaaaaaaaaaaatggagggcaaagaggaggatgttaagctaggagccaacaagttctctgagagacaacctattgggacatcagctcaaacagacaaggactacaaggagccaccaccggcaccattgtttgagcctggtgagctcaagtcatggtctttctacagagcctgaatcgctgagtttgttgctacctccttgttcctttacatcactgtcttgactgtcaatggtgtctctc

SEQ ID NO: 1464 - DNA, 378 bp, Gossypium hirsutum
  Clone ID: LIB3493-060-P1-M1-E12
ccgtgttatacaccgagacttcaagtccagcaacatcttgctggaacatgattttacaccaaaagtttcggattttggattggctagaaccgcaatagatgaagggaacaaatacatctcaacacatgtgatgggaacctttggttacttggctccggagtatgcaatgaccggtcaccttcttgtcaaaagtgacgtttatagttatggggtggttctacttgagctcttaacagggaggaaacctgtggacttgttacagcctccgggtcaagaaaatctcgttgcatgggctcgtccactccttacagacaaggaaggtctggaaatggtcatcgatccagccataaaatctgatatctcacttgatagcatagc

SEQ ID NO: 1465 - DNA, 383 bp, Gossypium hirsutum
  Clone ID: LIB3493-060-P1-M1-E2
gcagctcgcatctccaggaagggcgcggcctctgctttctccgctcaccgtcacgtaatctcatcccgttgtttcgccacggagtcggcgaaaacgatctcgccgtcgtcggatcgagtcaagtgggactacaggggccaaaggaagataatccctctcggacagtgggtccctaaggtcgccgtcgacgcttatgtggcacctaatgtcgtcttggccggtcaagtaaccgtctacgacggagcgtcggtgtggaacggctgcgtcctacgtggagatctcaacaagatcaccgttggattctgctctaatgtccaggaacgctgcgtcattcacgccgcttggtcctcacctaccggacttccagctgagacatcaattgg

SEQ ID NO: 1466 - DNA, 354 bp, Gossypium hirsutum
  Clone ID: LIB3493-060-P1-M1-E3
cggacgcgtgggtttctggatctggaagtgctcgccggggtcaagcatgtcttcaacgtcttcgtattggtgttacagctgcacccgtctggttcgtgtggtggttttggatagcgggtcaaacgacgccgttgtctgcccgtactgcgacggaggcttcatcgaggagatcgaatcttcggataatcacaaccgtcggtttccagctatgtacatgatcaccagcaacgataatagccgtcaaaattcgaatcgggcgcgaaatctcgtctttcgtaggaatcgtcgtggttctgttgaccggtcaaacatcaatccgatcatcgtcctcctgggctccaccgacgacgagaa

SEQ ID NO: 1467 - DNA, 381 bp, Gossypium hirsutum
  Clone ID: LIB3493-060-P1-M1-E4
cggacgcgtgggcgagtgtaaagcttcatatccttcttttcatgattcaaacaggattgcattaggaaatatcttgaagttccggaagaagaactggcagtttgatttctttggtggcgtcatatactttatattggttttctctatgtttccacagtgtaagcttgatcacatattgcaaggtgattcattttctggtcatctagggagcttctttggcacagtatgggataattttgtatatgtgctggaacattcttttgtatcactgactggcgtggtgctattgctgatcatggcaattgcatttgttccatccaaagtatcacggaagaaacgtgcaataatcggaattattcatgtatctgcacatctagctgc

SEQ ID NO: 1468 - DNA, 374 bp, Gossypium hirsutum
  Clone ID: LIB3493-060-P1-M1-E5
gccaccataagcaccctatggatgggctaaggcttgtgattccacctgcagaagctgctatactagctataatgttttggaacttgtatgggattttattcactatctccacaagacctgcattatttggaggtggactaattggatatgtgatatatgatatgatacattactatgtgcaccatggccagcctaccaaacaatctatcaaaaaacttaagaaatatcacttgaaccatcactttaggattcaaaacaagggctttggcataactacaacattgtgggacaaagtttttggaacccttccaaagaccaaagcagacacgaagagtggatagatgatgatgatgaggctgacaagcatcacatga

SEQ ID NO: 1469 - DNA, 164 bp, Gossypium hirsutum
  Clone ID: LIB3493-060-P1-M1-E6
gcaagacgaaggcttcttcgggtcccgttggaagcttgttcacaacggtggtgtttccattttggaagttttcagaaagaagtcaccgagactgcactaacaacaactgaaccattcaatgccttggccaccacaagagagctttgtgatactcgatgaagatg

SEQ ID NO: 1470 - DNA, 380 bp, Gossypium hirsutum
  Clone ID: LIB3493-060-P1-M1-E7
ctccactgtcctctttcgctgccgaacccaaacaaagcaatggctttccttccgcccaccgccactttcacagccgccctcctcctcctcctcctcttcctccacaccccactggccacgtcatcccccctcaacctcaccggcgactccctttcaccctacgaagtcctccaaggctacaacttccccgttgggcttctcccccaaggcgtcttaaagtacaaattagatgaatccaccggtcggttccatgcctacttagagggttcgtgtagcttctcactggaagggtcttatcaactcaaatacaaatccacgatcagcgggatcatctccaacaacaggctcaaaaacctgagtgggatcagtgtcaagatcct

SEQ ID NO: 1471 - DNA, 350 bp, Gossypium hirsutum
  Clone ID: LIB3493-060-P1-M1-E8
attagttctccagtaaccgagcagaggtcccccacataaaggacacaaaaaaaaaaaagaggaagaagaagaagaagaggagatttaactatggcagaaactcagagccgtggccttgttttcgccgggaagaagagaggaacaggaacctatgactttgacggggatgatattttcgtggctaagaaatcaatgttgcccacaatggcatcggaaagcgaccctgcctctgcattagccaacgctcgccatgaattcggtgaacatggtggtgttaacatgtccattgaagcctccgccaccttcaccgtcatggaacctgagaccatgcgcccgatgttcgccggtga

SEQ ID NO: 1472 - DNA, 373 bp, Gossypium hirsutum
  Clone ID: LIB3493-060-P1-M1-E9
cggaaaccaccattttcggaaatgcataaaaacaaagatggcgactattttatattaattacggtagttcgatctcccacttccatagtttttacttattgtttcctttcttcattaaaaaataataataattccctctcctcctgctgtctctctttgcaaatgtttggaaatttcatctttttgcctaaaaaataatatttttacagttatatctctgtcccctttgactgcagattgaaaggaaaataattagtttttttcttttttcctaatttttgttgttgatttcttcattcaaatgtttttcggttgaaacaaaagaagaagaaagacaaaaactcgaaatgtctgtcgtagatgttgctttgag

SEQ ID NO: 1473 - DNA, 378 bp, Gossypium hirsutum
  Clone ID: LIB3493-060-P1-M1-F1
gttacttagaatatctgaattcggaatgcccgcaaaaagcagatcaaatatcgacaaatatccgaatgcacacagtccatttccatcccattcatcaaatctagaagaaatgaaaacaataataaaagaaaaagggagagaatgagaatcgagaatcaaaccaggggttctaggtcgttcgagaatgatttcttcagtggaaaccatggtgaggcgactccccacatcttcacgcacggcatcaccgaatttctcccaattccttctctccagagcccgtttattcaatcgggccttggctagctttcggactcgggtcggcgtcgttattttcaccttattgccttcgtcgttgaacttgtattcgatcactttctt

SEQ ID NO: 1474 - DNA, 390 bp, Gossypium hirsutum
  Clone ID: LIB3493-060-P1-M1-F10
cgagggttgtttattcttatactgaaatggacgaaatcgtccatcctggtggatggtctagtaatcgccaacctgaacgagccgacactgtgtactacggagaatacaaatgcacggggaaaggcgcgactcctgctacacgagagaaattcttcaaacaactatcggatgcggaagctaaaccattcttgggtcttgactacgttgaaggtaccaaatggttgcttccccctccgacagtacctaaataattcattcattcccaactttttcattcctgcaacatatcctcacagtattgctaattcaagcagactctcgtctacctctgtgctgggtggaaataactagccatccattgtattttatttatgttattttcccttccca

SEQ ID NO: 1475 - DNA, 387 bp, Gossypium hirsutum
  Clone ID: LIB3493-060-P1-M1-F11
agaaaatcaggagtaactgaagaggatgcagatattcgtcaaaaccctaacagggaagactatcactctcgaggttgaaagcagcgataccatcgacaatgtcaaggccaagattcaggataaagaaggcatccctcctgatcagcagaggttgatttttgctggtaagcaactggaagatggccgaaccctagctgattataacatccaaaaggagtccactcttcacctagttttaaggcttaggggtggaaccatgatcaaggtgaagactctcaccgggaaagaaattgaaattgacattgaaccaactgataccattgatcgtatcaaggaacgggttgaagagaaagaaggaattcctccagttcagcaaaggcttatata

SEQ ID NO: 1476 - DNA, 292 bp, Gossypium hirsutum
  Clone ID: LIB3493-060-P1-M1-F12
gaaaaaacgaataactggctccctttccctcgtttcatttcaccgctaaatcctcgccacaacacattcatacaaaaatttctattgaatctaaaataaaaattggataatttcgaaattttagagattaattttctattctttgagttctcatttctatgagtagtcttccaagagtctacctcttcccctttattcttaataaacttttagttctctttcttctttcttcactgtcaagaatttcgagatcccgcgttttcctcattttctcagaactgtgttatagtag

SEQ ID NO: 1477 - DNA, 382 bp, Gossypium hirsutum
  Clone ID: LIB3493-060-P1-M1-F2
cttcttgtcttccgaagctcaccactttctacttttggactaggggtttctgttggatacttcgtttcggatcttgcaatgattttatggctatatccctctttaggtggaatagaatatgttattcatcacagtctttcaggaattgcagtggcgtattcaatgtttactggcgaagcacagctttatacatacatggttcttatatctgaggtgacaactccggagattaacataagatggtatcttgatacagctggtatgaagaggtccacagcatatctcatcaatggaattgtcatctttttggcttggctggttgcaagagttctgctattcggctacatgttctaccatgtgtacttgcattatacacaggtga

SEQ ID NO: 1478 - DNA, 385 bp, Gossypium hirsutum
  Clone ID: LIB3493-060-P1-M1-F3
gttttgtaagcatgagacactttgaaggaaaggtgaccctaaggttaaagaattattcaatgatattgaaaagttaagagtggaatttgaagctattgaaaggccgacattggaaattgagactccgaagattgatactcctaacgaggatatgcagatggttccggaatcgacacaacctaaacctgataatacaaaggcaaagactgaagcacaaccattgctggatcctgcagcagaattagcaaagctggagtcagaatttgggaagtgtagccaagactactcgactgaggagataggtgattgggagtttgatgaacttgaaagggaactgagagctggtgatactgcgccaggcaaataggtcaagtaatttaacctt

SEQ ID NO: 1479 - DNA, 367 bp, Gossypium hirsutum
  Clone ID: LIB3493-060-P1-M1-F4
ggagaacttagagttggggctcggcggcttgctcgccaacagaccaccatgccttcatctgtgatttccagccagagcatgcatttaggagtgcttgctactgctgctcatgctgttacaacgcagaccctctttgttgtgtactacaagccaaggacgagccaattcataataggtgttaataagtatttggaggccattaaaaatggattctcggttggtatgcgttttaagatgagatttgagggagaagacactcctgatagaaggttcacgggtactatagttggggtaggagatttttccccacattggtcggaatctaaatggcgaaccttgaagattcaatgggatgaacctgcaacaa

SEQ ID NO: 1480 - DNA, 345 bp, Gossypium hirsutum
  Clone ID: LIB3493-060-P1-M1-F5
gttgatatgctccaagctgctcgatctcaagtcaactgatcacactgctaaaagtgacccaagatattgggttacagtttcttcaaacttctccagaatatggaccaacatatatttccagaattcatccaataaaaatacaattacagaagacaagcagctgggataattcagctttctgcatcttatacctcggaaactttcatttcaagttattactattacagtctatgatgccatttgaaagttgaaactaagggacgtgaaactggattgtgatttatgtatatatactttgccagggtataatattttcttctttccactaacaaagtggagttggat

SEQ ID NO: 1481 - DNA, 370 bp, Gossypium hirsutum
  Clone ID: LIB3493-060-P1-M1-F6
ggtgaactccaccttgagatctggctcaaggatttacaagaagatttcatgggtggtgctgagattattaaatcagaccctgttgtgtcattccgtgagactgtccttgagaggtcttgcaggacagtgatgagcaaatctcctaacaagcacaatcgtctgtacatggaagctcgacccttggaggaaggtcttgctgaggccattgacgatggacgcattggtccaagagatgatcctaaggttcgttccaagatcctggctgaggagtttggttgggacaaagatctcgctaagaagatttggtgttttggccctgagaccactggccctaacaatgtggttgatatgtgtaagggagttcaatatc

SEQ ID NO: 1482 - DNA, 355 bp, Gossypium hirsutum
  Clone ID: LIB3493-060-P1-M1-F7
cggacgcgtgggcggacgcgtgggtggaaatgggaaccagttaggaaccggtattggatttggtaccggaaatggaggtcagtcaggaaatagtgttggatatggcgtcggaattggatcaggtggaaacaactggaatggacctgggactggagttggaatcgggtcaggatcaggcggactagggtcagggattggcgtgggatacggctcaggaggtgttcctgcatgtactaccggcaattgcaatctagtgaatggccctgggagctgtgtactagttggtccagctcattatgaacttcaaggacgatctgctgctggagctgcctaagagatgtcgaagattatgagt

SEQ ID NO: 1483 - DNA, 394 bp, Gossypium hirsutum
  Clone ID: LIB3493-060-P1-M1-F8
ctttgctcgaactcagcttaacgtttctctaaaacgttggccttctgtttcttcttcttccatggcggatcctagcaacttctcaactgtatccgccgaagatgaggcgaagtatggcttcacgcgcgaggagatgtactcgagtaaccttgctggcaccgtcaatccttacgaccgtcacttgttcctccgccataggtcctataccgattgggcttcccgcgtcgaagaggattcccttcctaagcttttctcctccactcttaagtctcgcaaaaacgacatccctgttaagacactgttgacggttattgaaggagagcaatctgatggagatgtgctgattttccctgaaatgatcaaatacaagggtttgacttgaggtgatgtggat

SEQ ID NO: 1484 - DNA, 179 bp, Gossypium hirsutum
  Clone ID: LIB3493-060-P1-M1-F9
atttatctatccattatatgttgtgttaataccaacttcatatgttagcactgcacttgccatgtttctaattgtatgattcaacttcttctttttgcatagcttgtttagtcctgacaatgtaccaaaatgcaattaagtttgaggcaaaaatgaatttgagagaaacccctttagtc

SEQ ID NO: 1485 - DNA, 385 bp, Gossypium hirsutum
  Clone ID: LIB3493-060-P1-M1-G1
aaatttttcagggctaagaaagagaaaaaaatggctttgcaaaaggctaaggacatcatatctaccaataccgtcgtcgttttcagcaagtcctactgtccgttctgtgtggatgtaaagcaattgcttcaaaaacttggagcttctttcaaggccattgagctcgacaaagaaagtgatggagctgatattcaagcagctctggctgagtggaccggtcagcgaactgtgccaaacgttttcattggtgggaatcacattggtggctgtgattctacaacaggcttgcataaccaaggtaagctggttcctctgctgactgaagctggagcttttacaaaatcatctgtttagaatagagttaagctgcttgtctcccctaaaa

SEQ ID NO: 1486 - DNA, 241 bp, Gossypium hirsutum
  unsure (1)..(241): unsure at all n locations; Clone ID: LIB3493-060-P1-M1-G10
atttttatttatattttaaggagcctttgctaaaacgcggctaatggctatatacgccgaggccggcatttagctttgtcatccttcgccattcttctttttctcacgtatgcaggaaaccagcccactgttttattctttctttttataactattttttcttcatgcatgtaaatcctatcaaaatctaattccattaacatttttttaataantaactttttttattaaatttggtgat

SEQ ID NO: 1487 - DNA, 214 bp, Gossypium hirsutum
  Clone ID: LIB3493-060-P1-M1-G11
cggacgcgtgggtttgctttgtatattgaagtttcctttctcgattttctatttagccaaacaagatgcagatcttcgttaagactctaaccggcaagacgatcactctcgaggtcgagagctccgacacgatcgacaacgtgaaggccaaaatccaagataaggaaggcatccctccagaccagcagcgtctgatcttcgccggaaacagctc

SEQ ID NO: 1488 - DNA, 305 bp, Gossypium hirsutum
  Clone ID: LIB3493-060-P1-M1-G12
gtgcttacaagcatcatatcattggatagagtttctctgaaacaaaaggtggttgatgctcctgaaatcttgactgtgattggaaaaattccacatctttcggaatttttaagttctctttacaattgtcagtacaaatcattcttcttagcattcgctggcctgacagagcagatcaaaatggaccgctgtttgcatctacatttccggttttacatgagagagatcaggactgttgtttactctcaatttttggaatcctacaagagtgttactattgaagccatggcaaaggtttttggggt

SEQ ID NO: 1489 - DNA, 384 bp, Gossypium hirsutum
  Clone ID: LIB3493-060-P1-M1-G2
catagtttggttttgtttgagaatggagaatcaagcaaaaaaggtgcttctcacttcaaatggagatgacatgtcaatgaacattgctttgcatttagccaaacgtggttgcaggttggttatgatgggaaatgaatggtgcctgaggagtgtgagagagaagataatgggttcaataaatgataatgtggtcccaatagaagtggttggattggatatggaggaggaaagagaaggcgtttttgatgacgctgtagataaagcttggaaagtgttcggatccattgatgcatttgtgaattgttatgcttacgaaggaaagatgcaagaccatttgcaattaggtgaagaagagtttagaaaaattataaaaataaacttcat

SEQ ID NO: 1490 - DNA, 383 bp, Gossypium hirsutum
  unsure (1)..(383): unsure at all n locations; Clone ID: LIB3493-060-P1-M1-G3
atttttgtttaaaaaaataaccctcatactctccaatctctcactctctccttgcttcctcgccgaaatactagcaccccggccctccgttcgcgcccagggaaggccctccgacagtgactccggtcatgaagatgtggatacgaacgtggagcagggcgtgcgtacgtgacgggagtgatcgtggctgaaggctatggtgctactgaagcttttagggatttaggatttcagttttctgattgtttaggttagagcatgagtattgggcttatgtaaacgggccaaaattatttgggttattttatgcaattgggctggttaaaaaattaggattgctgntttttgttttattttttgtatatgtatgggcccgagctaaa

SEQ ID NO: 1491 - DNA, 341 bp, Gossypium hirsutum
  unsure (1)..(341): unsure at all n locations; Clone ID: LIB3493-060-P1-M1-G4
gcggagcctccagaacgagacccgttgccggagttccgcctggattctgatgccggagctacctttgttcttgaatcaaaagggaagtggtggcatgcggggtttcatctgacgacggcaatagtggggccgacaattctgacactgccgtacgcgttcaggggactaggttggggcctgggtttcttatgtttaacggttttaggatgcgtcactttctactcttactatctcatgtccaaggtgcttgagcactgtgaaaaagccggccgccgccatatccgcttccgtgaactcgccgcctgacgtttaaggtctggtntgatggtttaatttggtat

SEQ ID NO: 1492 - DNA, 315 bp, Gossypium hirsutum
  Clone ID: LIB3493-060-P1-M1-G5
tgctgcggcatttcttcctcagaagacccgtcaaacagaaatgaagttcaacattgcaaatccgactactggttgccaaaaaaagctggaaattgatgatgaccagaaacttcgagccttttttgacaagaggatctcacaggaagtcagtggtgatgccctcggtgaggagtttaagggctatgtattcaagatcatgggaggctgtgataaacagggttttccaatgaagcaaggagttctcactcctggacgtgttcgtcttttgcttcacagaggtactctcctgcttccgtgggtatgggtaggagaaat

SEQ ID NO: 1493 - DNA, 287 bp, Gossypium hirsutum
  Clone ID: LIB3493-060-P1-M1-G6
gtttttaggacctcagttttcatcatctgttcattctcaagtggatgggttcagtcaacagcaagttaaagtggaagcagacccttgtatcgaagacaaaacaaccaaatacttgaacaggaaagatgtgcagaaagctttacatgcaaaacttgttggaatcaccagctggaacttatgtaacaagattgtgcaatacatggacgacctagagacaccaacaatttatattgttggtaaaatagtgaagtctcgtattcccgtcatggttacagtgagatcaggat

SEQ ID NO: 1494 - DNA, 219 bp, Gossypium hirsutum
  Clone ID: LIB3493-060-P1-M1-G7
aactgaaagaagatgcaacagcagaggctaaagcagcaacatgctctgatgcaacaggtgtacccaaatcccagtctcatgggtagtcctcagatagagcctatctcgagtggaaatcttcctcctggctttgatgcatctacttgccgtagtgtatacgtagcaaatattcaccctcaagtcacggaaccctttctgcaagaagttttcttgagtact

SEQ ID NO: 1495 - DNA, 382 bp, Gossypium hirsutum
  Clone ID: LIB3493-060-P1-M1-G8
ttggcattggtggcaccgtagaggactgaagcaacaatgggattatgtgcaatttgatgggaagattcgtaaggacattgatcgcacggttgcttttcgtacagctttgagaacatgggctaaatgggttgattcagatgtggataccaataggactaaagttatatttcaaggaatttccccttctcactacaatggcatagattggaatgagccaggagtaaggaattgttcaaggcagacgacaccattcaagggatcgatttatccaactggtttgcctctggcagagtacgtagttaaagaggtcataaggaacatcaagaagcctgttcatttgcttgatattacaatgctctctcaattacgaaaagatgcacat

SEQ ID NO: 1496 - DNA, 380 bp, Gossypium hirsutum
  Clone ID: LIB3493-060-P1-M1-G9
aaaattcaaagaaggcaaatctattagatcacaattccctcaaacacatcctcgacgaatccgtctctgagatcgttacgagtcgtgggtatgcggaagacgtgaggatgagcaatgtcagattattcattggagcgattatcattgtaatcgctctatttgctcagttttacaaaaataagttccctggaaaccgtgatttcctcattggttgcattgtattgtatatagttttcaatgtaatactccagctgttcagctacagaaaggaaaagaacgcaattatgtttacttaccctcctcctggatccgtcaccagcaccggattggtggtctcttcaaagttgccaagattctctgatctttatacgcttagcata

SEQ ID NO: 1497 - DNA, 351 bp, Gossypium hirsutum
  unsure (1)..(351): unsure at all n locations; Clone ID: LIB3493-060-P1-M1-H11
agaaaagaaaactttttattttggttttttctctgcgagaagagaaatacgttagaggttttcatatcccatataacctgaaactcaagcgatggaagggatggagcagtggaagggtcaattagagcagttgaagattcaattggagccatggaagattcaactggagcagtggttgcatcaagcaattgaatatttgcatcaaatacccccaattcaactctatgctgctattgctgtcttgttcatatctaccctcttgcttttctccatccgcttgttcaagcgcactaaatcaaataccatagtactcacaggccttactgggagcggaaaacangtctttctatg

SEQ ID NO: 1498 - DNA, 339 bp, Gossypium hirsutum
  Clone ID: LIB3493-060-P1-M1-H12
gtggtctgtgtatgaggttgaagtagagaaagaaaaactcagaaagcaagtagttgaattaaaggatgaccttaagaagaaggaagatgctgttactaccatggaaaagaagctgaaagagagcaatgaaagagcggcagtttctgatggaacaaaaacaccattagaagacgataaatctgccatggttcctctcagtcctatagaggttgcaagcctaagggagaaagtaatgctgcttgagggacaaataaagtcaaaggaaactgctatagaaacgtcaacaaatgtcttcttggaaatggaagaggatcttcagaagaaaaattgatgagttag

SEQ ID NO: 1499 - DNA, 368 bp, Gossypium hirsutum
  Clone ID: LIB3493-060-P1-M1-H2
cggacgcgtgggcggacgcgtgggcggacgcgtgggcaattttgagctcctaaagaagctggtccttcctgatggatcagttctccgcacccaattgcctggcaggcctactgttgactgtcttttcgctgatccggctagagacgggattagcttactcaagatttggaatgtaaacaagtgctccggtgtggtgggtgttttcaactgccaaggtgctggttggtgcaaggtcaccaagaaaacccgaattcatgatgcatcacctggtacacttacaggttctgtttgtgccaacgatgttgatttgatcgctcaggttgccggtgcggactggaatggggagagtgtggttatgctcatagatc

SEQ ID NO: 1500 - DNA, 361 bp, Gossypium hirsutum
  Clone ID: LIB3493-060-P1-M1-H3
cccttccatccctcttttgtttgctctatgttgtatcaacaatgcctgctcaagttacacctcagaaaatgattcagggagttgatcttgtagataaataccaccactcagttactctcactaagaaggcttgaggaaaaagtagcgatcataacaggcggcgccagagggattggcgaagccacggttagagttttcgtgaagcacggagccaaagctgtgattgctgatattgcggatgcagctggcattgccttagcaaactcattggcaccttcagcagtttatgtacattgtgatgtaagctcagaagaggacgtaaaaatgttgataaatagaacaatttcattttatgggaaac

SEQ ID NO: 1501 - DNA, 343 bp, Gossypium hirsutum
  Clone ID: LIB3493-060-P1-M1-H4
atcctgctcgacctttgacgcaagtcaagaaaaggagtcctttttcatccttctgcccagactatcgcctaatcaaaaatcaatcatggctgtgaccatcaagcgagcggccctcatcgttgccagtcttggcgtcttatcttttatctttggagtcattgccgaaaacaagaagcctgcagctggaactccaatttctggaaaagatgtggttatttgtaagtatccatcggatccttcggtggttctgggctacctatcggttgcatttctgatactatctacttctcactggctattggtccctgtttaacccctacaaaggaaaatctgttccacagtc

SEQ ID NO: 1502 - DNA, 364 bp, Gossypium hirsutum
  Clone ID: LIB3493-060-P1-M1-H5
gctcgatcgggttgatttgtttcttcctgggaggcaacaagaactcatcgtcagcgttgcaaaagctgcaaagagaccggttgttttagtgcttctttccggaggtccgattgatatatctttcgctaaggatgatccgagaatcggtggcattttttgggctggttatccaggagaaggcggaggtaatgcactcgcggaagtaatcttcggtgatcacaatccaggagggaaattacccgtaacttggtatccacaagatttcaccaaagtaccaatgacagacatgaggatgagacctgaatcatcattggactatcctggacgcacatacagattctataaaggagacacggtttttgaa

SEQ ID NO: 1503 - DNA, 309 bp, Gossypium hirsutum
  Clone ID: LIB3493-060-P1-M1-H6
ctttccttttaccagattctcgactctgtctgccatgatcgatcttatatcatcggtcagatctcttcaagcccatcaattcaaacagccctccactcatttcatacatgacgctaggctcaggaggatccagtgttgtggtgcctcggaacttcagattgctggaggagcttgagcgtggagaaaaaggtattggagatggtactgtcagctatggaatggatgacggagatgacatttacatgcgctcttggactggcaccattattggtcctcataatactggacatgaagggtcgatctatcagc

SEQ ID NO: 1504 - DNA, 304 bp, Gossypium hirsutum
  Clone ID: LIB3493-060-P1-M1-H7
ctcgaaaccaagcgtcgtcatggcccaaagcagatcatcaccgttaatggtcttccgcttttcgcgctgacacttgtcggaagcttctcccgtgatgaaactgatgaactcggagacgcattcctggaccgtttctttagcgtctttggagatcttagcgtttgccggcaacgcctttttcatgatcctgcttacgtttgcgatcggcaagaacctgtcttgctcacgcgccgacgtttcgctgtgagcgtttcctccgctgttgttatgcccccccgattcattggcggattcagccatcccc

SEQ ID NO: 1505 - DNA, 294 bp, Gossypium hirsutum
  Clone ID: LIB3493-060-P1-M1-H8
gttatgcagttgctgagggtgcacgctaacagaatgtgcaggttgaaaggtaaaaaggatgagcattatttgagttcattgaccttcctgataggtgatactggtggtcaactcaagaacataaatactaacttttaccttgatagccatgctgcacactctgttgcagctgagattaatgaacaatttgagttcacagaccatgatgttgacttgatagctgagtctatagagtgctcgataactaaacttctacctggtatgaaggtctatgcttatctgtcgagtggaact

SEQ ID NO: 1506 - DNA, 381 bp, Gossypium hirsutum
  Clone ID: LIB3493-060-P1-M1-H9
cagaattattgccaatcaactttgatggactgtcgaaggcagtgaagaagggagacactattttcattggtcagtacctgtttactgggagtgaaaccacgtctgtatggctggaggttagtgaggtaaaaggagatgatgtggtttgtgtgattaagaactctgcaacattggctgggtcattgttcactttgcatggctctcaaattcgtattggtttgcctaccctcactgataaagacaaggaggttataagtacttggggagttcaaaacaaaattgactttctctcactatcatacacacgacatgcagaagatgttcgccaagctcgtgaattcctttcaaagttgggtgacctctatcagacacaaatatttg

SEQ ID NO: 1507 - DNA, 409 bp, Gossypium hirsutum
  Clone ID: LIB3493-043-P1-M1-A1
ggggatcagggttatgtgatattgccattttggttgtcgacattatgcatggtttagagccacagacaatagagtccctcaatcttctgaaaatgaggaaaactgagtttattattgcattataaggtagacaggctttatgactggaaagctcgccgcaattcaccaattgggatgacacttaagaaacaaactaaagatgttctatccgaattcaataggagagttacacatgttataactcagttcaaggagcaagggttgaatactgaattgtattacaaaaataaggagatgggtgaaactttcagcattgtgcctacaagtgcagtcactggagaaggcatcccagatttgttattattactggtccagtggacccagaaaacaatggttgaaaaacttacat

SEQ ID NO: 1508 - DNA, 337 bp, Gossypium hirsutum
  unsure (1)..(337): unsure at all n locations; Clone ID: LIB3493-043-P1-M1-A10
ctaatctttcaccttcttctaaactcttcaaataaggcaaagaaaaaaaaagcaccgaaaaagatgaaaatcgggttccttgtatttgtagctgttgcattgctagcattcttggtgcccgaatgccgtgtatggaattagattcgtaattgatagagaagaatgcttctctcacgatgttaagtatgaaggggatacaattcatgtgtcgtttgttgtcatcaaggctgattcaacttggcataatagtcatgagggtgttgatctggtggtgaagggacctaccggngatcagattcaagactatcgagaccagataagggagaaatttgagttt

SEQ ID NO: 1509 - DNA, 364 bp, Gossypium hirsutum
  Clone ID: LIB3493-043-P1-M1-A11
ggagcacctggatggagggcgacctggcggtgataggatatatggagttttggacggccaatttccagctgcattgaagaaactcccctttgatcgtcatctttcattaaaaaatgtcacaaagttgtcactgtaggcaccatagctatcagccccatttgattgctccagaacaaggatacaggaggctcattgatggctccatcacctatttcaagggcccaccagaagcctctgtagatgctgtgcattttgttttgaaagaacttgtgaggaagtcaatagctgaaacaaaggaacttaagcgattcccatcacttcaaaatgacataactactgctgcaaatgaagcttttgaaagatt

SEQ ID NO: 1510 - DNA, 302 bp, Gossypium hirsutum
  Clone ID: LIB3493-043-P1-M1-A12
aggacttcaagttttgacccttgaggatgttgtctccgaggctgatatctttgtcggcacgactggtaacaaggacatcatcatggttaaccacatgaggaagatgaagaacaagccttgtttgcaacatcggtcacttcgacaatgaaattgacatgcttggtctcgagaattatactggtgtgaagcgcattaccatcaagcctcaaaccgataggtgggtctttcctgaaaccaacaccggcatcattgtgttggctgaaagacgtctcataaacttgggttgtgctactggccaccct

SEQ ID NO: 1511 - DNA, 397 bp, Gossypium hirsutum
  unsure (1)..(397): unsure at all n locations; Clone ID: LIB3493-043-P1-M1-A2
acggcataccacaaaataatgtcccaaggccatccataattcgtgcttgttcgtcctctaccaggcatggagttccatataacccaactgttggtagccgacatgttctaaaagaagcacatcattgcgctcgggttcacaggagttgctaggtgtgcataattctgtaattcaaagggatcgaggtactaagactaggaacatgagttgccaatttgtctcttccaacacaatgtccaaaagactagatactgaagttcctgcaacagtgacccacagtgcatatgttccaccagagaacattgagaacattacttctgctcatgcatcacagtatcaaccagagaacattgagaacattacttctgctcatgcatcacagnatcaacgaaatcct

SEQ ID NO: 1512 - DNA, 414 bp, Gossypium hirsutum
  Clone ID: LIB3493-043-P1-M1-A3
gttgtgagagagcaaaaaggactctatcatcgacagctcaaactaccttcaacatcgagggagtgtccaaaggcattgtctattacaccaccataactttttcatgggttatcgagctaacagaatctttttaagacacgaatggtaccaatcgagctcaaaaggttgggtaacccaaactgtgcatttacggtctctgcatgggtaatccattctggccttgcagttggaatgcgacttacgaaagtttactcggaaacaacaaaccattccctcaacctatttctctccctgaaatgatcgattttctggtcgacatctgggaacacgaaggattatatgactgagcaaacagtacagcgaagcacattcggaaaaaaaaaaaagaaaacggctagatattaatacccttat

SEQ ID NO: 1513 - DNA, 589 bp, Gossypium hirsutum
  Clone ID: LIB3493-043-P1-M1-A4
accagattgggtgttaggccatcaccagtggtggcagcattttcatctagaggaccagaatgtcctcacacttgaaattctcaaacctgatgtggttgcgccaggggtgaacatccttgcagctggactggagaattgggtccgtcaagtcttccaacagatcataggagagtgagattcaacatattatcagggacttcaatgtcatgccctcatgttagtggaattgctgccttgatcaaggccagacacccagattggagtgccgcagcagttaaatctgctctaatgacaaccgcttatgttcatgataacatccataatccactccaagactctttcactgcagcagcttccactccctatgatcatggagctggtcatatcaaccctttgaaagctctagacccaggtttgatctatgacatttcagcccaggattactttgtatttctctgcacacagaaattgactgcaatgcagcttaaagcttttagcaagcattccaatatgtgttgccatcacaacacccttgccactccaggagatttgaactacccagcaatctcagttgtcttcccagaagata

SEQ ID NO: 1514 - DNA, 488 bp, Gossypium hirsutum
  unsure (1)..(488): unsure at all n locations; Clone ID: LIB3493-043-P1-M1-A5
ctgcgatgcgtgccgcacggtggtttcggggataagccggaggtctgcaaggataggctgtgtgtggactatttgccctttctctgtttgtttcgtggatcctccgtgaggttgccgccttcatggagcagctgccttggatcaatcattttcacaaaacacccaacagggaatggtttgaaacagatgcggtgctgagggtcagcttgggaaattttctctttttcactatcctatcatttttaatgattggtgttaaaaatcagagggatcctcgtgatggtttgcaccatggtagatggatgatngaaaatgtctgctggttcattttagttattttgatgttttttgttcctaatgagattatcagcttttatgagacgatatcaaagttcggctcaagactgtttcttttgattcaagttgtgcttttacttgactttgttcatgggtggaatgacaaatgggttggatacgatgagcaattt

SEQ ID NO: 1515 - DNA, 247 bp, Gossypium hirsutum
  Clone ID: LIB3493-043-P1-M1-A6
ttaaaaagaaaaaaagagagatggcgtctgtaataaaatctgcaatcttaattctgtgccgatgtttatctttacacttcactttccttgtttagtcgatcctcctataacttactccacttatacactagaattctctgctcaagctttttcaccatacactccaccaagtaaaattatccaacaactacgactctgaacgtcatttcccaatatttattttcttacactatcctatcaagactaa

SEQ ID NO: 1516 - DNA, 175 bp, Gossypium hirsutum
  Clone ID: LIB3493-043-P1-M1-A7
cttggtttctgtgtttggcgttgtacggaaatactttctccatagcaatgagcgaggcgactgaggaatccgaacttcacaatggacaccaaccacaagcagaaccggaccggacagaatcaaaagcggaatctcaacccgaatcgaaaacggagccaggaccggaaaacaaacc

SEQ ID NO: 1517 - DNA, 402 bp, Gossypium hirsutum
  unsure (1)..(402): unsure at all n locations; Clone ID: LIB3493-043-P1-M1-A8
gccgccgccattgcttacggtcttgacaagaaagccaccagtgttggtgaaaaggacntgttgattttcgatttgggtggtggtacttttgatgtttcattgcttactattgaaaagatctttgaagttaaggccactgctggtgatacacatttgggtggtgaggatttcgataataggatggttaaccatttcgttcaagaatttaagaggaagaataagaaggatattagtgggaaccccagagcattgaggaggttgaggactgcttgtgagagagcaaagaggactctttcatcgaccgctcaaactaccatcgagatcgattcattgtacgagggtttagacttttacaccacgataaccttggccaagtatgaggagctaaatatgtatcttttt

SEQ ID NO: 1518 - DNA, 460 bp, Gossypium hirsutum
  Clone ID: LIB3493-043-P1-M1-A9
gcctgagaggcttccaacagattctcctaagaggccgagggaaccatttatgggggtgggcgatcctgctggactttggcatttcatttatcgtagtatatttcttgagcaatatgatcttctgagttctcaccgccacttagcagtccccagcaacagaaaaggttatatagagcttaccaaagactgtatgattccatgcatgataaaggaattgggccccataaaactcagtttagaagagatgaaaactatgttttactctgctgggttacacaagattttgaactctatgcggcattcgatccccttgcagacaaggcagtagccataaagacttgcaacagggtttgtcaatgggtaaaagatgtaaaaaatgaaatttttttgcagggagctagccccttttcatggtaataaaaggcattcatggtaaacataatatgtactctaacttttg

SEQ ID NO: 1519 - DNA, 431 bp, Gossypium hirsutum
  Clone ID: LIB3493-043-P1-M1-B1
cctgtttccctcttttttcaactttctctctgattttctcgacatacaaagacatcgcttagtttacgactcttcttttttgccttcccatttttgttactactattagcagtgggggaaacttttctttcctttttctctgttaacattcttggtaaggtttgcttcatgcaactttctcttcgttttcttggtgaatttttggtttaattttctttctcttctagattttttgtggttttaattagatggtatttgggtctgaatctgatccatgttttaaagtgatctgttttgattaaattttataattcacatcttggtagagctgatcaggtaatttcgataacggtactgtacataagtctgaatttagggtttattacaaccgataggacagatccagttgcagcatctgtttggcttgcgag

SEQ ID NO: 1520 - DNA, 199 bp, Gossypium hirsutum
  unsure (1)..(199): unsure at all n locations; Clone ID: LIB3493-043-P1-M1-B10
cggacgcgtgggcggacgcgtgggctgaaatcgagcgtttggcggccatgnctggaagagtataaggtttacttggtgatgggtgtgatagagagagatggatacactctatattgacggtggtgtttttcgattctcaaggtcggttcctggggaagcacggggagatcatgcccacggtattgaagcgcataatttg

SEQ ID NO: 1521 - DNA, 400 bp, Gossypium hirsutum
  Clone ID: LIB3493-043-P1-M1-B11
ctatgatcttcctgtgaaacacgacaaccgtgtggagcctgattgtgagggtgacgtggcatagaattggcagagcaggacgttttggtcgcaagggagccgtgttcaacttactctgggtgatatggaccaaatgataatatccaaaatcgaaaatcattttgacagcaaaatagcagaggttcctgactggaggaatgaggaagactttaaaactgctctccggtcagccggtttattatgaacggaaaccttctgtcaaagctatcttggtgaaatgctagagaagaggaacaaacagattgtgcttatagtatgctgtatactcgactatttgggcccgattctgttggtttgattttgatttttgctagtcgcaccatgttttaataaggttgct

SEQ ID NO: 1522 - DNA, 96 bp, Gossypium hirsutum
  unsure (1)..(96): unsure at all n locations; Clone ID: LIB3493-043-P1-M1-B12
cgctttttggttgcagaggaaaaaaaagttttaaaaaagtcatcttttttatatgtcgagtgtttttaaacacggtgatgttttnnctcttaaaaa

SEQ ID NO: 1523 - DNA, 462 bp, Gossypium hirsutum
  Clone ID: LIB3493-043-P1-M1-B2
cggacgcgtgggggaaatctggtttcaacattgatccttaccatggtgatcaagctgctgacatactggtcgatttctttgaaaagtgtaagaaagatccatctcactgggataagatctcaaggaggcttgaaacgtatcgaggagaagtatacatggaagatttactcggagagactattgaccctgaccggagtgtatggattctggaagcatgtttccaaccttgaacgccgtgagagtcgtcgttaccttgagatgttttatgctcttaagtaccgcaagctggctgaatcagttccattggcagaggagtaaatttaagctgttaaataacattgggccggtttttcttggagaataatattctgttttgtaatttcaattggagaagctcttttgtatttcatcttgtcttttccttttccttttttcgccggcattggttgaacatgggggttg

SEQ ID NO: 1524 - DNA, 401 bp, Gossypium hirsutum
  Clone ID: LIB3493-043-P1-M1-B3
gtcagaagttcaggaggttaagtttgctttagacaaaggttggaaaattgagaaaggacggtgttgggattaagtggaagtgtagacacatctggccttgagattaatggaagtccggacactggtgcttccatcatagaattgacctcagtggaacagatgcatttgcaggatgttgaagatggggttggcaagaagaagtctttaatagtgtcactttcaggcttgaacttatatgtcggaaagaagtttgacatgtccatgaaaatgggggtacaaggttgatgatcatggtgaagcgatgagctttaaactgctgcagtaatgcaaatttgatgttataatttcagttgttttaagtaatggaaattgaaatccaactttcccttggtttaattttg

SEQ ID NO: 1525 - DNA, 441 bp, Gossypium hirsutum
  Clone ID: LIB3493-043-P1-M1-B4
agagacatggcaatgccaagagatcggacccttcatctctgtgtactcatcttgggagcgacaccacttcttggataggaggactgaatggcaccgagctcctcaaggccggctgcaacaacatactactactcattatgctatgctattttaactgccgaccccaacgcatgtggcccacaagcccttgccggggaccttgctaatgctgctttacgcttagctcaaaccaaggccacccacgcgcaatacctcatacctctcctccttcaaaatgccaccacctctttggaccacaaccgtctccaaatgtgccaaagtagcaacaacaaggccatttctcagctctcatcggctaacaatgacttcaactccgactcactcgacaccatggtggaagagataaacactgctgctcgtgctactaatgactgcttgact

SEQ ID NO: 1526 - DNA, 410 bp, Gossypium hirsutum
  Clone ID: LIB3493-043-P1-M1-B5
gcactactagagagtctacttatgctggtacaacattgtgcttcagaatatggttctgggggtgccattaacgaaatcagacggactaactttgcccatcgggataaagatcatactcttacactagtctgcacctaattctcttaatcagcattatgattatgaggatcaaaaatcttacaggcctgttaattagcacatgtaacaccgtttcaaggatgagacagacagctatagagagcatcgtcatctatgacgtgacctagattatgatgataactgatataggggacagtcttcttcaagatctcggaacaggtcccatgcaacacgagaagaagagcacaggtctcgatcaaggcatgtgtactatgtcaagaatagacccctaccatcagagtgacaaacta

SEQ ID NO: 1527 - DNA, 405 bp, Gossypium hirsutum
  Clone ID: LIB3493-043-P1-M1-B6
cacctatccaggggtttggaccgcttatatcttgatcgttttcttttcgtggctcagggtgttatctgtatttggcacctctccgggaatcgcttggaccattgttcatctcacccatttttgttacatatcacttctttcactggaaaaaaggaacaccatttgctgatgaccaaagtatttacaatgggttgacttggtgggagcaaatagataacggcaagcaactcactccaaacaggaagtttttgactgttgtacctgttgtgctgtatcttattgcctcacacacaacagggtatcagaactcgctgctcttctttaacacactagctgtttttgtgctggtggtggcaaagttccctaacatgcacaaggtgcgcatatttggaatcaatgctgatc

SEQ ID NO: 1528 - DNA, 410 bp, Gossypium hirsutum
  Clone ID: LIB3493-043-P1-M1-B7
aaactcaaccatctttgtcctttcattgcttgcttgcctgccttaaacctgcgtcgggcatagccatgactactgtaacggtaatggctgattaagtcccttttgctccacaaataaactaccaagccactatctcttttgggtcatggaattaccgacattgagattcactttttgcaaatcaagttcacagcaattggggtttaccttgaaccagaagttgtaggacatttgcaacaatggaaggggaagcctggggacgtgctacctgaagatgatgacttcttcgaggctcttattaatgctccagtggagaagtttctgagagttgcggtgattaaggagatcaaaggttcccaatatgcagtgcagctagagagtgctgtgagggacccattggcagctgacga

SEQ ID NO: 1529 - DNA, 292 bp, Gossypium hirsutum
  Clone ID: LIB3493-043-P1-M1-B8
agagtgcaaacccgggaatctgaatagggtcatccagcaaccatcttttcctgttggtttggatttcttacgaaagaggaaaccgtctgatgatataaacgtcgaacacaggatctacacttgtgagttcctcaaatgtccttatagtgaactccaattgggttttcttgaccggactgccagggacaatcatcaactaacttgtccacatagaaactcgtctgcagagttcggtggttcgaattttaacataaatgatgtgaaaccggtcattttcccttcaccatttgcg

SEQ ID NO: 1530 - DNA, 307 bp, Gossypium hirsutum
  unsure (1)..(307): unsure at all n locations; Clone ID: LIB3493-043-P1-M1-B9
cggcaacctctatacgaagctgaagcaaatgtcaggaccattgaagcctgttatgganatagttgagagaatggttaaagccttgattggacctattttcgagacgttctttgattctttacgacctgttcaaatttgctgatgactggattggtgaatttgtgactaagattgatggtattctccctccagtcatcaagcaggcaatatccaaagtcacctcggctgccaataatgctttaggactgactgttgatgtgcctactatggaggtccaaagtactgtagtgaaaagcactttctttag

SEQ ID NO: 1531 - DNA, 463 bp, Gossypium hirsutum
  unsure (1)..(463): unsure at all n locations; Clone ID: LIB3493-043-P1-M1-C1
tggacctcaccaacaggtaatgagtgaggtctaccaacctgaaaccgataattggtgccgtgtctataacggaatggttgcaggctggcggaacccatgtacttccttaaacggccatcttatgctttggagtgcaangganntggttgtaagctannagggtttatgatgaagtgannctgattcttggggaaagcatatnncgatagtaggattcatcnntgggcaattctcgagctnttagaagcnagcagctctcgttccacttaacgggaaactctgcatcattcggaataatatgagtgtatctttggtcgatgttacaaaatccgacgatctgaggggagctacagctgaacatttatgggaaaccatagcagggaagggtcagttcaagaccttgtttacaaatctttggtctagccttgctgggcggaaccggctgaaaagccacattgttcac

SEQ ID NO: 1532 - DNA, 166 bp, Gossypium hirsutum
  unsure (1)..(166): unsure at all n locations; Clone ID: LIB3493-043-P1-M1-C10
cccacgcgtacgtttttgttttctattataaataaattgctcctggttagcatgcatggcgtttgagtatgtgtatcttttaattcgtgtcattatgacttggtatgaaatagtttattatatnnaaaaaaaaaaaaaaaacaaaanaaaaaacaaaacggggggg

SEQ ID NO: 1533 - DNA, 455 bp, Gossypium hirsutum
  Clone ID: LIB3493-043-P1-M1-C11
atttgctgctgcaacaagatggatgcaacaactccaaaatactccaaggcaaggggtgatgaaattgtgaaggaagtctcctcatatcttaagaaagttggttacaaccctgacaaatcccatttgtcccaatctctggatttgagggtgataacatgattgagaggtctaccaaccttgactggtacaagggtcccactctccttgaggctcttgaccagatcaatgagcccaagaggccttcagacaagccgctccggctcccacttcaggatgtctacaagattggcggcattggaactgtgcctgttggtcgtgttgagactggtgtccttaagcctggtatggtagtgacctttggcccctctggtctgaccactgaagttaagtctgttgagatgcaccatgaagccctctctgaggctcttcctggtgacaatgttggattcaatgtc

SEQ ID NO: 1534 - DNA, 437 bp, Gossypium hirsutum
  unsure (1)..(437): unsure at all n locations; Clone ID: LIB3493-043-P1-M1-C2
acctttacacctatatttcatgaaccaccgtcactatttccataaacacatactgggggtggtatacaaggcttcgtgttggcctaaattattctacatcaagtattaccattgctgcatccttatttgaactcctcaaagccttcacacttcggtcattaaaaccacctgcattaccgtcaccgctgctgccgcgcttttcttcgcccgcttctaccagaaacccgctatcgccgccgngacgacacccatcgtggagaccgccacgaggggatcgatggtctccttagaagagcaagagaaaaccctggtacaaaaattagggaagactccgaatgacgttgaaacgctgcggtctctgatggaagtccggatcaaattaaagaaactgcagcaagctatcgatgttatcgagcgtttgattcgtctcgaacccc

SEQ ID NO: 1535 - DNA, 344 bp, Gossypium hirsutum
  unsure (1)..(344): unsure at all n locations; Clone ID: LIB3493-043-P1-M1-C3
atcgagagatctacaaacctcgattggtacaagggtcctactctccttgaggctgtggggagatcaccgagcccaagaggccctcggataagccactccgtcttccacttcaggatgtccaagattggtggtattggaactgtccctgttggtcgtgttgaaactggtgtcctcaaacccggtatggttgttacttttggtcctactggtctgaccactgaagttaattctggtgagatgcaccatgaatccctacccgaagctttccctggtgacaatgttgggttcaacgttaaaaacgttgctgntaaggatcttaaacgtgactttggtggtccaaactc

SEQ ID NO: 1536 - DNA, 245 bp, Gossypium hirsutum
  unsure (1)..(245): unsure at all n locations; Clone ID: LIB3493-043-P1-M1-C5
gatgagttggctaaaaacgctgcttatattggaacccctggaaagggtatccttcctgctcatgaatccactggcgaccatcggcaagcgtctttcaagcattaatgtagagaatgttaaataacagngcgtgcttctccgtagctncctattcacaactccaggagctcttcagtacctcagtggtgttattctctttgaggaaaccctttatcaaaaaaccggttcaggcaagcccttctttg

SEQ ID NO: 1537 - DNA, 268 bp, Gossypium hirsutum
  unsure (1)..(268): unsure at all n locations; Clone ID: LIB3493-043-P1-M1-C8
gggcaagttccactctttccatcctgtggctacaatcctcagttacctcaccagancccctcttgttccacgcaggcacaccggtggtgaacccactgtccaagcagcgtgcaatgctgagaacatactaagggccagcattggcttggctcctgaaaacaacatgattttggaatacaagtgaagaagttgaggagagaaaagtggaacaaagctttggttcttagaactttaggaccattttccctttctctggcgtattcataaa

SEQ ID NO: 1538 - DNA, 374 bp, Gossypium hirsutum
  Clone ID: LIB3493-043-P1-M1-C9
cccacgcgtccgataaatataaccctcatgtgaaaccaaaaatcttcactctttgttttcttctggtttctggtttccacaattttggtagaaaagggacaattaaatgggaatcgcaagaagctcacaacttgaaggtactgggttcaggcgatcgagtcatcgttttggctcatgggttcggtacggaccaatcggtttggaagcacttggttcctcacttagtcgacgatttccgtgtcgtattgtacgacaacatgggtgccggaaccaccaaccccgaatacttcgatttcaatcgttatgctactctcgaaggttatgcttatgatttgcttgcgatccttgaagaaatccacgtcgattcatgtatt

SEQ ID NO: 1539 - DNA, 309 bp, Gossypium hirsutum
  Clone ID: LIB3493-043-P1-M1-D1
gagagggaaaggacaaggcaggattgattcatgactactactatcattaagactcgccagcagatcacaaagcacaagaggacctagctaacccactccctcttctactaaggaataccatcattccacttaccgaaactgcacctgttctttcaggaacttctgtattcctcaaaacaccatataatattttcttaatctcaacatcaactccccatattaccatcccaaaactcgatcaatgctttaagatccacttcctcattctgatcctaataagaacttctatcacatttataatcaatttat

SEQ ID NO: 1540 - DNA, 186 bp, Gossypium hirsutum
  unsure (1)..(186): unsure at all n locations; Clone ID: LIB3493-043-P1-M1-D10
attttcttattgattttgcagatcggttctctaatccttttttcgggtgtagccgtggttatacctttggggtggggtgaaaaaaanctactaccattgctacaaaaaaaaagtggggactttaaagaagcttattttaaaagaaaaaaaaagggggggggaggtcaattcaatcttttcttttta

SEQ ID NO: 1541 - DNA, 328 bp, Gossypium hirsutum
  Clone ID: LIB3493-043-P1-M1-D11
ctcatttggtctagtaccagctaggtgtttctcttgggctcatatggccgggggtgcccaagtgcctacactcagcatcccggtggtgaaactgagctcctcctccggcggcggacatgccggtgatctgaatgggcacggcggccgatccatttgatgaaactgctttgaaagaggcgattctggaggctatcagtgtcgggtaccgtcacttcgacgctgcatcgctttacaaatcggagaagccattgggagaagctctagcagaagcgataaagttcggttttatcacatttcgcgaagaactttttattacttccaagctatg

SEQ ID NO: 1542 - DNA, 325 bp, Gossypium hirsutum
  Clone ID: LIB3493-043-P1-M1-D12
tcggacgaattcagtgaagaaataaccaagaagtctacatctgtggaggattcaagtgagatttatgagcttaaagatgaacattcgggagacaagacaaatgaaacctcataaacccatattttaaaatcaaaatgaaaagctcactgtgggaactcttaaggacgatggtttaaacaacaatttttagaaaaagattgttttagaaaatctaactctgtaggatcaaaaacaaccgccccttgtcgtgaaagaaaacataactgtttctggggaagcaatttagaaaactctagcaagagatttgcaacctctaaaaactggg

SEQ ID NO: 1543 - DNA, 410 bp, Gossypium hirsutum
  unsure (1)..(410): unsure at all n locations; Clone ID: LIB3493-043-P1-M1-D2
cggacgcgtggggtaatttgtaacttttaacgtaaatgattgttaatgatatgatgatggtcttttcatttttcaattcaatcatttcttctattttctcaagagctcaaagtttttttacttgtnngaaatagaaaccccgtttcaaagaaagtaatgagccaaatgtcaatgagagttttctccaaagtcgacttagagttagcaatctatatatttgtatgtgtgcttcaaattaaaggaagctattatgatttatgctactgtaactttcattttgctcaaagtaccatgcccaacaccaatatatgacacattcagacatgggtatggggatataattctncaagtgcatggaaatcttgaaaattttgaacatacttgtgtcgggcatatactcattttcctac

SEQ ID NO: 1544 - DNA, 267 bp, Gossypium hirsutum
  Clone ID: LIB3493-043-P1-M1-D3
ctcatttttgcacaaccatacaagcaaactaaccccatctaggtgtcttcaacatggaggagatgggaaagagctggctcctcctggcttttatactttggcagataattccaaatgaagcggcatcgctgtgggcggtggtgttggcattggtatcggtaatgcagggggcgttggtggccgaggtgttttgattggtggaggaatcagcagcaacaccccaactcctttaagcccttcagtggcaaagctgagcaggggttacac

SEQ ID NO: 1545 - DNA, 156 bp, Gossypium hirsutum
  unsure (1)..(156): unsure at all n locations; Clone ID: LIB3493-043-P1-M1-D4
cggacgcgtgggcggacgcgtgggtaatgtatgtcttttggctctgttttgatacctgtaangcattcatttaggggtcactaatttcaccattataagctgaaaaccgtataaatacgtaaaactttaaagatcttaaagttattcctttttaat

SEQ ID NO: 1546 - DNA, 410 bp, Gossypium hirsutum
  Clone ID: LIB3493-043-P1-M1-D5
tctccatcttcaaaaatagcctgggaggcgttttacaagccatttttcggcatgggtaccgactccgcggctgtggaggaaaatgaaggtaagcttgccaaagttcttgacgtgtctaagctcgattgacacagtcaaaatacttggcaagtgactgcttcaccttggccgacctgcatcacattcccaacattcaatgcttgttggctacacctgccaagaagctgattgattctcgtccgcatgtttgtgcttgggtgaaggagatcactgctaggcctgcttggtctaaggtcctcgctatgcaaaaacagtgaaaggtttcggcgatttggagcccacccgagctgatatcaatagtccaatgttgaataagtccttcgcatgtttatttccgctcgttaaagtct

SEQ ID NO: 1547 - DNA, 92 bp, Gossypium hirsutum
  Clone ID: LIB3493-043-P1-M1-D6
cttcaattaaacaaaaaacttggctaagcctaacttttctttccatgtaattggtcctgggggtgttttcagctactgcgttgtgatcgatg

SEQ ID NO: 1548 - DNA, 428 bp, Gossypium hirsutum
  Clone ID: LIB3493-043-P1-M1-D7
gtttgacttgaagcagatgtggaagagtcctaatgggactattaggaatatgttgagcggcactgtctttagagaaccaattatttgcaaaaatgtccctcgacttgtcccaggttgacaaagcctatatgcattggaaggcatgccttcggtgatcagtaccgagcaactgatgctgtcattaaaggagctgggaaacttaaacttgtttttgttccagagggacagggtgagaagactgaatatgaagttttcaacttcactggtgaaggaggagtttcactggccatgtataacacagatgagtctattcgtgcttttgctgaggcttccatgaacactgcttatcagaagaagtggcctctttatcttagtacgaagaatactattcttaagaagtatgatggaagatttaaggatatctttca

SEQ ID NO: 1549 - DNA, 428 bp, Gossypium hirsutum
  Clone ID: LIB3493-043-P1-M1-D8
gtattatggcggtccttttccctttactcccctttccatcttagcgtacctccgaagcccatttgttcatagttctctccatcctcctgtacttgctcttcctcctcctacatggaagcccctcctcaaggttacaggagaaatgtgggtatttgtctcatcaactcctccaaaaagattttttcggcctcgagactagacattcccagtgcttggcaaatgcctcagggtgggattgatgacaatgaagatccaaaagttgcagccctcagagaattaaaggaagaaacaggtgttaggtcagctgaagttctcgcagaggtaccttattggctgacatacgacttccctccagaagtcagggaaaaactgaaacatcagtggggatcatactggaaaggtcaagctcaaaagtgggttctccctaa

SEQ ID NO: 1550 - DNA, 181 bp, Gossypium hirsutum
  Clone ID: LIB3493-043-P1-M1-D9
cggacgcctggggcaatatccacgggtagatcttttatcactttgaaatccaagccaattctcatataaaaaagcttctataaaagtacttataaattactgaaaatttcaaatcatgctactgctagacttttgtttcacactttcatataatatttcgtgaccacgtaccaattcattt

SEQ ID NO: 1551 - DNA, 464 bp, Gossypium hirsutum
  Clone ID: LIB3493-043-P1-M1-E1
agaggttgtaacactaattggaagctgccaggatgcagctagtctgataaatcagagaagaaatacattggggattactagaagactccttagaagaacgtttggagaaggaaggaggtttgtttcagattctgaaaagacagaagcagagaacaaagaaggggatgtagatgacagtaagaaaagatcagttgaaggtggaaagcaaggtgcttcaacgaaaaagttgaaaaaggacaaagctgttaatgcgacagcaaaaagtgctcgccctgaggctaaacccacccctgctgcaccacgagtcaagccagagctcactttgcccgtaatgtctacagaggtagaacagtctatacttgaggacttaagaaaccgtgtacagttgagtagcgttgcattgccatctgtcagcttttatacgttcctcaacacgcataatggtttgaactgttcatcaatat

SEQ ID NO: 1552 - DNA, 200 bp, Gossypium hirsutum
  unsure (1)..(200): unsure at all n locations; Clone ID: LIB3493-043-P1-M1-E10
tagagataagggattaatgaaacatgtacttgaaatatttgaaaatgctcaccgcnnttactcaatatactacttgatggacagtttcatacagaacttgaagggaccattctttgagaaggaagggcttcattgcctggatgtttnttanctggcgcgggagcagtccnacctgttgttttttttctccccccttccct

SEQ ID NO: 1553 - DNA, 429 bp, Gossypium hirsutum
  Clone ID: LIB3493-043-P1-M1-E11
ctttcttcttcttctcttcatattggttttttcccttagaactccacgacagagagccaaggagttggggaaaaccctcacacaaattctctctctaaatcttaaccgaaaaggtctccaaaaaagaactaccctttttgcccatttactctccttattcaacaaattcagcatcacatccccaaaatagtcgcttttttatctcttgctttcttcatctgcttcaagtcatggctggtttagcacccgaaggatcccaattcgatgctcgtcaatatgatcagaaaatgagtgatttgctccaaacagacggagatgattttttcacttcttatgatgaagtttatgacagtttcgatgcaatgggacttcaagagaaccttctgaggggcatctatgcatatggttttgagaagccctcagcgattc

SEQ ID NO: 1554 - DNA, 483 bp, Gossypium hirsutum
  Clone ID: LIB3493-043-P1-M1-E2
cccacgcgtccgggaaaacacaagaaaaacagaactagggttttaaagagaaagggagcggaagtgatagagaggagagaagaggctgaaatttttaggattagggttttattatattgttcttacggtttataaaatggcggccgacaaaggaaagaagatggatgtggctgacaaagtagatgaagagaaccatgatcaaatagatggagacctcgtcattttcatcgagaagcttcaagagatccatgacgagcttgagaagattaatgctgaggctagtgacaaacgtttggaagtcgagtcaaatacattaactttgccactatgtatcataagtgaataaatatctttaactttgatctggtcaattttttgtcatttctctgcgatttatcttctaacccatatgttgtctttattaatttcagaggatttggtgtggaggtctaactttactaagttggatttgaaacttgcaca

SEQ ID NO: 1555 - DNA, 482 bp, Gossypium hirsutum
  Clone ID: LIB3493-043-P1-M1-E3
ccttcatcgtctccgaaaggtgtagtgaatagcaggggacagttatcgccagttcgtgggtcaattcggcctgcatcaccaagtaagcttggggcctccactacttcgtctctttgagggatgagtccctctagagtgaggagtggattggctaataatttggtaaatactccatcaattttgagctttaatggtgatgttcttaagatgggtaagattggggagaataaggcttgggatgctcattttttgaggctacttcataataggctgttgcaatggcgttttgttaatgctagagcagatgctgctatgtcttcccagaagtctaatgcagagaaaagtctctgtggtgcatggataactacctcaaaacttcgagaatctgttagagccaaaagaactgagtttcagctgctgaagcaaaagttgaagctgatttccatcctaaaggggcaaatgatgcttttggatgaatggga

SEQ ID NO: 1556 - DNA, 93 bp, Gossypium hirsutum
  Clone ID: LIB3493-043-P1-M1-E5
cggacgcgtgggtagtagtgacttttaagggaaggataaaccttgtttttcagctggtggatttttctgggttggtaaaatttggattttact

SEQ ID NO: 1557 - DNA, 618 bp, Gossypium hirsutum
  unsure (1)..(618): unsure at all n locations; Clone ID: LIB3493-043-P1-M1-E6
gagaaatcaaaattcaaaaccctagttagggtttttatcttcctcaatctcccgggggagactgcaaatcgggcacaatgtcgatgtccaagagttccaaaatgcttcaattcataactaccgtatgcggggtcacttattccaagaacgggccgtcagttggtgggtaaggtttatggcttttcgattcgtcacaatgaattctcgtacttcggtggactgcggagggagttcccgtaagtttgcccgccggctaaaaggggaagaaaaaacccccagtacccaatgaggganngcgtgaagaatcgtagaaacgctttggtctttgttctttcttcgtgggggaagaggggtatnttctattgacttgttgaggggtccttcctttcttctggaagagtcgccgttcaaaagtctgcccgctggctaatgcntgttccntggacctgggtattgggtcgtgcttgctgggtcgtgggattccgactggtcctcttgttcaagctcaggctggtcttgctgggctgttcgtggtgtggtggaccgctctggatatcagcccagattcacggcgcggttcgactgtagtcgcttactacctgtgtaggagactctgta

SEQ ID NO: 1558 - DNA, 180 bp, Gossypium hirsutum
  unsure (1)..(180): unsure at all n locations; Clone ID: LIB3493-043-P1-M1-E7
cggacgcgtaggcgaactcgtctttcaaatgatgcaaaggctccaaataacccaggatatatacaataaagacgggcttgtttatntctacannaaaaccctaaaatttgatttatagctgcctttacccagtcactaacatatcatgtctttaagggggggggtaccttattatttttt

SEQ ID NO: 1559 - DNA, 197 bp, Gossypium hirsutum
  unsure (1)..(197): unsure at all n locations; Clone ID: LIB3493-043-P1-M1-E8
cggacgcgtgggttttctcacttgtttatcagtctttggtcatccaaattcaagtttcaactccaaaatatggggagtcaaccatggnttttcgtttgccacccattgttgttaatccagcaagtccttaaagctcaacaggctcaatcaagtgtgccggggggtcacattgcaatctatgtatgggaggttgatag

SEQ ID NO: 1560 - DNA, 344 bp, Gossypium hirsutum
  Clone ID: LIB3493-043-P1-M1-F1
cttttcttatcataaccaataccaatggcatcttcagcttcattgatggtcctggctttggtaatggcgagcattgccgccattgctgaggctcgagctttcttcatttttggtgattcactgttgacacgtggcaaccaataactatcctcgaaaccacggctcgtgctgattccccaccttacggcatcgattattcgacaggaagacccaccggccggttctctaatggccttaacatcccagacctgattggtaagcaaattggattgtcggagtcaccattgccatatttgagcccagattttaatggtaaaaagctgcttcttggtgctaactttgct

SEQ ID NO: 1561 - DNA, 501 bp, Gossypium hirsutum
  Clone ID: LIB3493-043-P1-M1-F10
gtctgatttcagcaacggagagagtctccggcaacacaatcacagggattggggggaagccctctccttctcttattatttttgtttaaaagagatttaaaaataaaatataaaaaagaaaagaacacgaaaatagaaatcgaaattaaccgttttttgcttctattttttctttttgattgcttaatgttcgtaaaaaaatttacaaatgaaaatcgtggctcttatagccaattcataaactgttagttttcattttttttgtctttttgcatgttgtttcttctgcttggcttcttcgtttgcgtgttgcaggtggttgtcagagacgtcagatgcatgcgacaaaacggtgtgcgtggtggtcgagggtagcgtgcggcgctggtcaagggcagtggggcatgcggcggctgcaccttggggactagggttttgtctgctgaaaaaaaagtttaagatagtgggctagggtttgatgtaatgggtcatttggttttg

SEQ ID NO: 1562 - DNA, 396 bp, Gossypium hirsutum
  Clone ID: LIB3493-043-P1-M1-F11
gcagaaatgttgtcgatggcagcaccactttccactctgccactgttgctgcgggaggggacgggttcttggccagggatataacatttcagaacacggctggaccatcgaacaccagcagtggcactgcgtgtgggctctgatttatcagcattctacaggtgtggcattttagcataccaggacactctctatgtccacagccttcgccaattctattcacaatgccttgtagcaggcagcgtggacttcatattcggaaatgcagcaccagtgttgcaagactgcgacattcatgctcgtcgacccaatccaaaccaaaggaacatggtcaccgcacaaagccgtagtgacccaaacgagaacactgggattgtgattcagaaatgtaggatc

SEQ ID NO: 1563 - DNA, 586 bp, Gossypium hirsutum
  unsure (1)..(586): unsure at all n locations; Clone ID: LIB3493-043-P1-M1-F12
cggacgcgtggggtttaccagaaaaataacagccacaacattgggaacctgggtggcaacaaatatagcggcaacaaccatagcaacaaagatattaataataaccgcaacaccaatccaacaacaacgagaacagcaatgcaaacaatgctgtcgataaaaggttcaagactttgcctgccaccgagacactccctagaaatgaggtgcttggtggatacatctttgtttgcaataatgacacaatgcaagaagatcttaagcgtcagctatttggtttaccgccaagatacagggactctgttcgggcaatcacacctggcctgccattgtttctctataactacaccactcatcaattgcatggtatttttgaggcagcaagttttgggggttctaacattgatccaactgcttgggaagacaaaaagtgtaaaggcgagtcgaggtttnctgctcaagtgagaatccgtataaaggaaggatgccaggcattggaagaggatgcttttaggccagtcttgcaccactatgacggtcccaaagttccgctcgagctctcagttcctgagactttggatctaat

SEQ ID NO: 1564 - DNA, 406 bp, Gossypium hirsutum
  Clone ID: LIB3493-043-P1-M1-F2
cggacgcgtggggttttgcggttgtcttctgaatgtgatgacacatacacctagagaagagcttggtaaggtaatggattgcatcgagaaggctaaaccagaactaggtcgtgtggtaacttttgataggggagcaaaacggtgaagggaatttcaagaacgaagcatcggaactttttaatcatatcagttccgatgtaaagaagccttactgtaactgtttgattgatctctgtgttaacttagatttgttggaaagagcttgtgatattttagagctgggactttccctagagatttatgccggtatacaatcaaggtctccaacacaatggtccttgaatctcaagagtctatctctcggggcaactttaactgcactacatgtttggatcaatgatttgac

SEQ ID NO: 1565 - DNA, 434 bp, Gossypium hirsutum
  Clone ID: LIB3493-043-P1-M1-F3
cacacttcacaatcatgcttgtcctttctccaacttcttcttcttcttcttccttggtttgcacttgtttcttcatcattctctttgtaaccataaactcctccaatcctgtaccattacaccaaggccaaacgccccccacgccagctttctgtcaattactatgcaaaatcttgccctcaagttgagcaactcgtcggctccatcacctcccaacaattcaaagaaacccctgtctctgcacctgccaccattcgcctcttcttccatgactgctttgtagaaggttgcgatgcgtctatccttatagcaacacagcctggaagtaaaatattagcagagaaagatgcagcggataacagggacctgagaacagaggggtttgatacaataacgagagccaaggctttggtggagagcaaatgccccggcat

SEQ ID NO: 1566 - DNA, 229 bp, Gossypium hirsutum
  Clone ID: LIB3493-043-P1-M1-F4
acttatatacatatattaattgggaggagtatcactcctttcctttccactgaattctcacgatccactttatcatcccaagatataataccccattttttccacaaagttcttgaataagttgatttaaaaactcgggatttattctcgagaataagtggagagaaaaagtgtaaaacaacattttaatttagcacagaaaacaacatacgatggcgacgttctttta

SEQ ID NO: 1567 - DNA, 382 bp, Gossypium hirsutum
  Clone ID: LIB3493-043-P1-M1-F5
atccactgtccagctacaccttcggcaccaaagagccgaagatggagaaggacacgtgcgggccgatcgccttgctcgcatgaaagtcaattatatgaaaaagggcatgagaacaagtgtgaaacgattttactggtccaagaacataatcatcctcacattcttcttttgcaaattgggaacacattttgcaaacttcctggtggacgcctcaagcctggagaaaatgcttcaaagatctagggtctgaaaaggaagctgaccaccaagcttggagctaatatacctgctcttgtgccacattggcagattggtgagtctgtggccatctggtggagggccaaatttgagacaatgatgtatccatattggcctccccaca

SEQ ID NO: 1568 - DNA, 442 bp, Gossypium hirsutum
  Clone ID: LIB3493-043-P1-M1-F6
cgactgagctgattggatgaaattgcaaacagctgaaggggatggaggtggaaaagagtggagagatacttggagagctcagccaccatcgatggagataagctgcctttgagattttcacgcctaatcatgcatggtctccgcgttgaactcatcgaaaccaatcgcgtcgttttctcttttaaggtcacccctcgtctgttgaacgagggaaattacttgcatagtggagccgtagcgaaatttgtagacttggtttcctccgcagcaatatacactgctggaggtaccttcgttggaacttcagttgagatcaatatttctttcatggatgctgctcatgctgatgaggatattgagatagaagcaaaggctttacatgttgggaaggctgttgctgtcctcagtgctgagtttaagaaaaaaagtactggtaaaatta

SEQ ID NO: 1569 - DNA, 456 bp, Gossypium hirsutum
  Clone ID: LIB3493-043-P1-M1-F7
cccaagttcagagctctccttctcttcattgaacatagattttatggtgagtgaaggccatttttgaaagacttataccactcagcaaagaccctggggtacttaaattcacagcagccttgtgctgatttagcacgttctgataacgaagcttgaagtcagaacccgtcattctgaagcatctcccagtgtgtggtcttcggtggatctatatgagaggattgttggcagcatggtttagacttaaataccctcatatagcaattggtgcattggcttcttcagcccctatattacagttcgataagataatcccatggtcaagcttctacgatgctgtctccctggatttcaaggatgtaagccagaattgctatgaagtgataaaggggagctgggcagaactggtggcaatttcaactcggaaacaagccttggctgaactaacaaagcttt

SEQ ID NO: 1570 - DNA, 470 bp, Gossypium hirsutum
  Clone ID: LIB3493-043-P1-M1-F8
ctttagcttttcgcttcgagagagaccatgttggtttaccaggatctcatcgccagggacgagcttctttctgactcattcccctacaaggaaatcgagaatgggatgctgtgggagttgagggaaagtgggttgtgcaaggagctattgatgttgacattggtgccaatccttcagccgaagatgctgatgaggatgaaggtgttgatgaccaatctgtgaaggttgttgacattgttgacactttcaggcttcaggagcaaccccctttcgacaagaagcagtttgtcgtgttcatgaagaagttcatcaagaacttgacaccgaaactggatgcggaaaagcaagagtccttcaagaaaaacattgagggagcaaccaagtttttgctttcaaaattgaaggaccttcaatttttcatcggagagagcatgcacgatgatggatgtttggtatttgcttactacaag

SEQ ID NO: 1571 - DNA, 284 bp, Gossypium hirsutum
  unsure (1)..(284): unsure at all n locations; Clone ID: LIB3493-043-P1-M1-F9
ggctttgagccgccacctccaccattagtagggatagaagaggaagaatcaggttgtcttcctgtttatgaaaccgcaggtatgttatccgaaatgttcaatttcccttcggtcggtgctgccgctgccgccgccactgcctcgaccgagttactagaccagcatgtacagccgaattatcgagcacaccggccaaccccaggtaataccaacgagtggtatagcaacaggcaaggtgctgttgggggtttgggacagttaggtgaatcgaanagtcacattac

SEQ ID NO: 1572 - DNA, 474 bp, Gossypium hirsutum
  Clone ID: LIB3493-043-P1-M1-G1
tgataattcaggcatcccgaggagatcttgctgtggggctgtacatgtgggcgcatcacctcttgcctatagttggtggcaagaactgtaatccacaatccagagatctaattttacaactgtggaatggatcttatctgccccaaaagctcggacaattttagtaaatgccgcagttagaaaaggggagcgtttggtgccgccggcttcatttgagattctaatgcgagttaccttccctgcttcttcgtctagagtaaaggcgactgaaaggtttgaggccatctatcccacagtaaaggaagtgggtcttgctggttctcacggaagcaaagcgatgaaacaagtgtctctgcagatatttcattttgctttcaaagcggccggtgacggcactcctgagttgtccaaagaagcagccggaatagtcatatggtctttgaaccagaatgctgaatgctacaggatttggga

SEQ ID NO: 1573 - DNA, 345 bp, Gossypium hirsutum
  Clone ID: LIB3493-043-P1-M1-G11
gggctagtgcggagcaagctttatcggttctgaacggtaccatttttggaggaagaaatgttcgtctttcatggggacgaagtccttcaaccaaacaggctcaacctgatcctcacagtggaacagcggatattatggatatgctcaaggatatgaagcatacggatatgcacctcctccccaagatcctaacatgtactatggtggctatcctgctggatatgggaattaccaacaaccaggggcttaccaacaaccacagcagtgagttgcactcgtttcaccatccttcaaaactggttcagttcggtccaggccacagtttggtgttggtttgatcttcac

SEQ ID NO: 1574 - DNA, 203 bp, Gossypium hirsutum
  Clone ID: LIB3493-043-P1-M1-G12
gacgatttggattcagctattagacgtttgaatgaacttcgtttaggatcgggtgggagaaatgcagcaattgccgctgatgataaaactggtgtggaattaaaagaacttaactcaaggtgtagcagccaatggagatgtggctaaggaaccgacaggtgcagaagctatggatggtttttattgggtggacctttcttgat

SEQ ID NO: 1575 - DNA, 56 bp, Gossypium hirsutum
  Clone ID: LIB3493-043-P1-M1-G2
tcgcccacgcgtacgctttatttttttctaaatccttcctttttttgaatattttt

SEQ ID NO: 1576 - DNA, 349 bp, Gossypium hirsutum
  Clone ID: LIB3493-043-P1-M1-G3
cccacgcgtccgattttcttcttctggttctgaagatgaaggaagggataaaaggcaaaggagaggcgaagaagaggaagaggagaggaaaagcacgaagaagaatgataagaaagaaaaagaaagataagaaatctcacaagcactcttctcataaaggttttaattttaagtttataagttcaatattatttctcctttctattttgtttttaatttattgaatctttgttgggcattgggtttaggagtcaaaagttggaagaattgggttatattcatttgttaacttaaaattttacaattttaagaacagtgaaggcatacttaggaaggggaaggtgcaggg

SEQ ID NO: 1577 - DNA, 280 bp, Gossypium hirsutum
  Clone ID: LIB3493-043-P1-M1-G4
acggaaccttgcctggacaatacaccttttcatcatcaggagaggccacctcttataatggcttattttatagctgcggaaagatacaccatactgtcattgggcctctggaacatgatccgtttatttctatcggtgtgggcgacatggtcataaatgttagattaagacctcaatctagacaatattatgttacttttgcctcgggtggagaattaagtcaaactgggttgaccatatcaacattgaatcacatgtaccaatgcttatatgatgtaca

SEQ ID NO: 1578 - DNA, 155 bp, Gossypium hirsutum
  Clone ID: LIB3493-043-P1-M1-G6
cccggtcgaccacgcgtccggaacgtggctagtgttatgtgttcttacaacaaggttaatggtaagccaacttgccggaccctgatcttcttgctggggttattcgaggccaatggaaactaaatgggtatatagtttagatggtgacttcggta

SEQ ID NO: 1579 - DNA, 132 bp, Gossypium hirsutum
  Clone ID: LIB3493-043-P1-M1-G7
gcgaaacatagttataatttaagttttgggggttctttgttagtgccaaaaagaaagctcgttccgaagtatagttaacgatgtgagggatgctttggggagcttatctaggcgtagttggaaggtgaagat

SEQ ID NO: 1580 - DNA, 116 bp, Gossypium hirsutum
  Clone ID: LIB3493-043-P1-M1-G8
gtttgtttcatttattatcttctctaggattttttgattaataacaagacgacacgccctgttttaaaaaaaaaaaagaaaacagtcaaaaaaaaagaaatcttttaaaaaggttt

SEQ ID NO: 1581 - DNA, 228 bp, Gossypium hirsutum
  Clone ID: LIB3493-043-P1-M1-G9
caagaagtgatgaccttgcttgcatatgacggtagtgaaaatggatgggcagtctgcttcactggttcagatgaaatggtgagagccaatggagagaaagtgcttagcagcatgacatgctatgccactcgggaaaaacttgcgaagcaaatggggtttatcccggcacttcccaaacattttttatggattattgctgcccataaatagactgggacttatccttac

SEQ ID NO: 1582 - DNA, 320 bp, Gossypium hirsutum
  unsure (1)..(320): unsure at all n locations; Clone ID: LIB3493-043-P1-M1-H1
gcgcggagtaaatataaggaaatcgaagatttgaggagagaagaagcttgtcgcaaacagagtattatagaggctaaaatgaaacttgctgatgcttaaagggatcttcaaaacttgcctctatgagncctccttaaggaggaaattgagagattgaaaaggcaaattcttgagctaacttctttttctcatcaaatgatgcaccacaagaaagagaagggaaaatctctatggcttatgaaaacaaccctaaagaactgggtccatggtttgaaagatatttgaaatacaaaaacttaacttctttatgctttaaagaa

SEQ ID NO: 1583 - DNA, 179 bp, Gossypium hirsutum
  Clone ID: LIB3493-043-P1-M1-H10
ccaactcttagcgttaatgtcctttataaggttcaagacttacttcttttgggtgggaccccactttcactaggggtggcaactgccttttctttccttaccttcttccttccacaaaaacacacaaaatcctactccatatcgaaccctttctactaccactactggtggtaaccacc

SEQ ID NO: 1584 - DNA, 443 bp, Gossypium hirsutum
  Clone ID: LIB3493-043-P1-M1-H11
gatggatgccactacccctaaatactcgaaggctaggtatgatgaaattgtgaaggaagtctcttcctacttgaagaaggtgggatacaaccctgacaagattccatttgttccattctggttttgagggtgacaacatgattgagaggtctaccaacttggactggtacaagggccctactcttcttgaggctcttgaccagatcaacgagcccaagaggccttcagacaagcctctccgtctcccacttcaagatgtgtacaagattggtggtattggaactgttccagtcggccgtgttgaaaccggtgtcttgaagcctggtatggttgtgacctttggcccgtctggtctgacaactgaagttaagtcagttgagatgcaccatgaagctcttacagaagcacttcccggtgataatgttgggttcaatgttaaaaac

SEQ ID NO: 1585 - DNA, 392 bp, Gossypium hirsutum
  unsure (1)..(392): unsure at all n locations; Clone ID: LIB3493-043-P1-M1-H12
ggaagatctctataatgggatttccaaaaagctttctctttcacgcaacataatttgctccaagtgcaaggggaaagggtctaaatcaggtgcatcaatgaaatgttctggttgtaaggttcaangaatgaaaagtctccaatcagacaaccttggtcctctccatgatccaacaagatgcaagcacccttgcaatgattgtaagggtactggtgagaccatcaacgataaggaccgttgcccccaatgcaaaagtgagaaaagtgttcaagagaaaaaagtcttggaggtttatgttgaaaagggtttgcagaaccgacagaaaattactttgcctggagaagcaagattaagcaccccgacacaattaacttggggatattggttttttg

SEQ ID NO: 1586 - DNA, 442 bp, Gossypium hirsutum
  Clone ID: LIB3493-043-P1-M1-H2
tccagatctgatcaaagaacaaccaatcaaacaggttgcttagaagtcccaagttagagaacatgggtcgtggagtcagcagtggtgggggacagagttctttgggttaccttttcggacggagaagctccacctccgaaaccaaccaatgtcacgagtactggcaccaccagtagtgaagttcctcagaagcagattgaggttgtgaaggaaaccgtgcaaaaaccgaccactgcttcaccatcatcgggtgatgctaaggagatccctacaggtgttccagggagcaaaacgaacaactatttccgagctgatggccagaattgtggcaactttcttacggagcgccggacaactaaggttcacgcagcgcctggcggggggtcttccttggattacctgtttggtggcagtgagaagtgatatgtgagatattaaatgt

SEQ ID NO: 1587 - DNA, 486 bp, Gossypium hirsutum
  Clone ID: LIB3493-043-P1-M1-H3
tgaaaatggctgctaccttctttaggagactctccaaagccaccccagctaccttcaacagtgcatttcgaggtcaacccaagtccggttttgctggatttcgcttctgtaccatcgcgcgtgccggtggaatctctacttactactgcttctccgactcaaatttggttcatctagatcaagtcaatgaagagactggtccaaaagttgctctgaaatctgataagtggcttgaatttaagttgcaagatactgcaagagttagtcacaacactcacttgttcaggttttcatttgatccctctgctaagttgggattggatgtcgcttcatgcatccttactagggctccattaggacaagatgctgaaggaaaaaccaaatatgtcatacgaccgtatactcctatatcagatccagatgctaagggatactttgacttattaatcaaggtgtatccagaaggaaaaatgagccaccattttg

SEQ ID NO: 1588 - DNA, 283 bp, Gossypium hirsutum
  Clone ID: LIB3493-043-P1-M1-H4
ctccgtcttcaaaacctacctctactgttgttggaaaaggaagagaaaggggtgacggtggttcttagaatgacaagaacaaatgtggtgcttcgaaatttgtttctagtttcaagaactgggttggaagctgacataattggggcttttagtgagatgggaatatggataccctctgaaattcagtgtgttgggatccccgctttgttggatgggaaaagcgtcgtcttaagctctgaatctggatctggaaggacttttgctttcttgttacccctcatac

SEQ ID NO: 1589 - DNA, 573 bp, Gossypium hirsutum
  unsure (1)..(573): unsure at all n locations; Clone ID: LIB3493-043-P1-M1-H5
cttgcttcaagcctaagggagtctagattcttcgatcgtaaaccccaaaatggtgctgatggaaccccactacgctgatgaacaacaagaacaaaaagctacgaatgccacgctaacaccattgaacgacacccgcttccgccgcctcatcaaatgtgaacggagaagacgccgcctccgatggattcgaaacagcgagcgagcgtgacgtcgatgacgacgaagaggaacaccacgtcaataatcaacagccatctgaacagaaagcttccgattcttatcaagatgccttaaacgacgagcaattgaaagagaaagctttggcacaagcaaatgatgcgaaaatggaaggaaataaattgtttggaaacggacaattcgaggaggcattgttacagtatgagattgctttgcaaattacaacggaaatgcctactgccgttgaacttcgtntcgtttgtcattcgaatcgagctgcttgctttctgaaacaggggaaatatgaggataccatcaaggaatgtacgaaagcattggatcttaatccttcttatataaaaagctcttgttaga

SEQ ID NO: 1590 - DNA, 419 bp, Gossypium hirsutum
  unsure (1)..(419): unsure at all n locations; Clone ID: LIB3493-043-P1-M1-H6
aatttccacctcacacctacccatgcattgatgattatataattagtatttactaaaatcgtactttttatcgctaaatgagggtgctccaaattaaaaggaaagggtctaaaatcaagtgcattaatgaaatgtctctgacccatctgaaacgacacccatttccgcctctctcatccaaatgtgcaacgcgagtaagaccccctgcttccagttgccattcttaaactaatgagcagagctgctacgttagatcactaccaatagggacaccttcgcccctaatcaacagtcatatgaacagaaagcttccgattcttatcaagatgccttaaacgacaagctattgaaagagaaagctttggcacaagcaaatgatgcnaaaatttaagcaaataaattgtttcaaaacggacaat

SEQ ID NO: 1591 - DNA, 386 bp, Gossypium hirsutum
  Clone ID: LIB3493-043-P1-M1-H7
cagcttttaagacaaaatcttcaaggtttcttcatatattgatcttatcttgcttctgaaaatgtctctgattccaagcttcttcggcaaccggcgcagcaacgtgttcgacccatctcacttgatgtttgggacccattcagggacttcgctgtctctacgacacggacgccggaaacctcagcctttgtcgacacccggatcgactggaaggaaaccccggaagcccacgtgttcaaggccgatgtgccggggcttaagaaaaaagtgaaagtggaagtggtagatgatcgggtgttgcagataagtggggagaggaacgtggagaaggaagacaagaatgatacgtggcaccgggttgaacggagcagcggcaagttcatgag

SEQ ID NO: 1592 - DNA, 184 bp, Gossypium hirsutum
  Clone ID: LIB3493-043-P1-M1-H8
ttttgtattaagagtcgccctttggtgtttttctaattcaatcagtgaggtgagggggaatgtcttgctgtggtggaaactgcggttgcagctccccttgcaagtgcggcggcagtgcagctgttgcaagatgtaccctccaatgactttttttgatcaacgccacactcacccactacttctt

SEQ ID NO: 1593 - DNA, 446 bp, Gossypium hirsutum
  unsure (1)..(446): unsure at all n locations; Clone ID: LIB3493-043-P1-M1-H9
gaacaatgttggagcttctcaaccagcttgatggatttgaagcatctaacaggagcaaggttctgatggccaccaatcggattgatatcttggatcaagctcttcttaggccaggacgaattgacaggaagattgaatttccaaatcctaatgaggagtctcgtttcgacatcttaaaaatacattctagaagaatgaatttgatgagagggattgatctaaagaagattgctgagaagatgaacggtgcttctggtgcagagcttaaggctgtgtgcacagaatcaggaatgtttgctttgagggaaaggagagtccacgtaacacaagaagattttgagatggcggtggcgaaagtaatgaagaaggagagcgagaagaacatgtccttacggaagctatggaagtgattatgttttattanttattgggctttcgcggttttg

SEQ ID NO: 1594 - DNA, 403 bp, Gossypium hirsutum
  Clone ID: LIB3493-045-P1-M1-A1
caacagttgagtacaccgcggaagaatattcaaagctgatgtcaacaaacttcgaggctgataccatttctgccaacttgcgcatccacttctaaaagcatctggaaaaggcagcattgtttatttcgtctgttgcaggtttaacccatgttggcagtggatccatttatgcaccaactaaagctgctattaatcagctcacaaaaagcttggcctgtgaatgggcaaaggataatatcaggaccaactgtgttgctccctggtacatcagaacctcacttgttgaacgtttgcttgaaaagaaagaatttatggaaaaagtaatatctcgaacgccacttgaacggattggagaaccagaagaagtgtcatcaatggtagcctatctttgccttccggctgc

SEQ ID NO: 1595 - DNA, 115 bp, Gossypium hirsutum
  unsure (1)..(115): unsure at all n locations; Clone ID: LIB3493-045-P1-M1-A10
atttatttcactacccaacaacccaaaagataaaaagaatcgtttacttgttcntgacgatttaatctcatttgaagctcaattctcttaaaatttttgtgcttaacttcttttt

SEQ ID NO: 1596 - DNA, 464 bp, Gossypium hirsutum
  Clone ID: LIB3493-045-P1-M1-A11
ggccaactctgtacttccccaggttgaacagttgggaactgcacaatcaaatgggtgtgaacctaacaacttattacctccatttcctggaagggagtattctgcttaccacaatgcaactgatccacagaacaatcttctctttggggttagcattgattcctcgtctcttatgctgcatcatgggatgacaaacccgaaaagcatcagaaatgagaatgattcgatgtcccttccgtacgctgcttcaaatttcacaagtgcttctggcacagattttcctcttaattcagacatgactacctcaagttgtgtcgatgaatcaggttacttgcagtcctctgaaaatgtggaccaagtaaacccttcaactggaacctttgtcaaggttcacaagtcggggtcctttgggcgctcattggatatttccaagtttggcagctatgatgagctgcgctgtgagc

SEQ ID NO: 1597 - DNA, 358 bp, Gossypium hirsutum
  unsure (1)..(358): unsure at all n locations; Clone ID: LIB3493-045-P1-M1-A12
ggaacattgacgttgacttggattctgatggtctgcctctcccaaatagcggtgcagagccaatactactcggagagcttaccatatgatcccaggccggttaaggtcactaatcttacttctttttgcatgaaactctccgcggtaagaacccaacagtagtcatggtagcccaaactaacaacacaagcaacgacaactactcatcagtgccatttggcaccctatatgccattgatgatcccctcaagataggtcctggggacaactcagaagtgattgggaatgctctgngacttgggatcttgtccggcaaaaattcaacgaccgtggtgatgtacttagattttggatttac

SEQ ID NO: 1598 - DNA, 310 bp, Gossypium hirsutum
  unsure (1)..(310): unsure at all n locations; Clone ID: LIB3493-045-P1-M1-A2
ggaaaaatggtgattggaaatagcaaggctggtgaacctataactgctgatgatcttggtngtggcattgctaaaacaggtctcataaacgatnccattaaccctactctgatgcgacctcgagggaacccctgttcttgttcatgctggtccatttgcaaacattgctcatggtaattcatctattgtggctgataagattgcactgaagctggttggaccacaagggtttgtggtcacggaagcaggttttggtgctcatattggaacagaaaagttcatgaatatcaagtctagatacagcgatcta

SEQ ID NO: 1599 - DNA, 182 bp, Gossypium hirsutum
  Clone ID: LIB3493-045-P1-M1-A4
ctaccactaatccgcacaatcccttcgcgtgcgtaacaagagccgaccacccttcacagtccacctaatgaatgacccctgacgccaaaccgcgtggggacccactacctcatcaccctcccgtttctttctttttgcactccgttccgaataacggctctagtcatatgtacgactaccaa

SEQ ID NO: 1600 - DNA, 396 bp, Gossypium hirsutum
  Clone ID: LIB3493-045-P1-M1-A5
cccttcccttttcaataataaaaatttccatgacaagacgcacaaaatcaagggttcaaaatcgtggtcctctgttgctccttgtcaagaagaaatcccaaaatccactgttatggttagtactgcttgaaaatctcaactcaaaccacaaggactgcgaagatttatctttgatcctcacccaactggttcagatagaaaaaccgcaatctagcctactagatcttctacagagattcatatgtagctcacagaatgggatgaattcactggagacacctgtgcatggtctaaaattggctttggatgaaatctcgtatgacttggctgtatcaactggaaggatgtttactttcaaccggaccacttgttgcctactacctgcttcaagttttt

SEQ ID NO: 1601 - DNA, 231 bp, Gossypium hirsutum
  Clone ID: LIB3493-045-P1-M1-A7
tggacgcgtgggcggacccgtgggtaaggatttaatctccaaaccttcttggggtgtgttcattacattgggggggagaaaagaaccaaaaaagcatggccaaagttctgttgtattgcactatgtgtgcttccagctttgggtagtgctacacgcattgtggataatcaattggtggttgtaggctatgtgtactgggatacttgccgtgctggttttgaaacccctaag

SEQ ID NO: 1602 - DNA, 376 bp, Gossypium hirsutum
  Clone ID: LIB3493-045-P1-M1-A8
cttttgcggaatcttttgaatagccgagacaatccggactgtgtcctggaatttggctagcctcgaaaatgggtggggagaatatgaattatatcgaggaagggacaacttggcaggaaagctcttgtcggattgaatggtaggtgttggcagatggtgagcaaagcaaactgcttactgtgagttctattatcggctcagtcaaagatggtttcttccgattctcagagaaatttgcagcagtccaaaacaattgaggtactcgaaactgcagaaaagctgatgaaagaaagtgacccatacatcgtattccatatttgcctagaaaatgctgagcagaagaagttggatgttgcacttcactatgcaaagcagc

SEQ ID NO: 1603 - DNA, 357 bp, Gossypium hirsutum
  Clone ID: LIB3493-045-P1-M1-A9
ggaacgtgtcaaggaaaggtcttcgcaccctacagatacctctcagttcacaggcgtatgcagtcgtttgagaacatccggagcaaaaatgttacaggaataggaagtgcacctctttagtgatgatgaagacacagcgcaaatattaagctccgcaaatagaggccggaaagggtcttcgtcagcttctcgatcatcacgtgatgcttctgaacttggtaaaagttccactagaggaaggggtagaggtaggggcagaggctctagtggcttaaagcagacaactcttgatgctactttggggtttcgccgttctcaaagatctacctcggttaaggttcacagtattgctgatga

SEQ ID NO: 1604 - DNA, 519 bp, Gossypium hirsutum
  unsure (1)..(519): unsure at all n locations; Clone ID: LIB3493-045-P1-M1-B1
cgggaacgaagctcattattcgatcataaaacaaggccaattcattcatttggatgacgtnggcagagctcatatctttctattcgagaatccaaaagcggaaggtcgccacatttgcgctctcaccatgctaccattatcgatcttgcaaaaatgctcagtgaaaaataccctgaatataatgttcccaccaagttcaaagatgtggatgagaacctgaagagtgtggagttctcctcaaagaagctcttggacttgggatttgagtttaaatatagcttggaagacatgttcgtaggagctgtcgagacatgccgagaaaagggactgcttcctctttctaatgagaagaagatcaaaaacatagactgaaaaatatgaactttcaacaattgagtgcctacccatgtcttccatttctagtagtgaaaacaataaagatttaaatctattatctngttcctggtattgtacaatttttaattgcaaacattggtaatgtaatttggagtctattct

SEQ ID NO: 1605 - DNA, 403 bp, Gossypium hirsutum
  Clone ID: LIB3493-045-P1-M1-B10
taaacatcatcagaatgtacaagcaattaaaatactttcaacaataccagacggaggtgggctgacctcgtggatacgaggaagcacagcggatcgtaaacgatgcacttggctatcacggtcggcggcaacgattttgtgaacaactactatttggttccattctctcctagatctcgccagtttagtctaccagattatgttcgatatctcatctctgagtacaggaaacttctaatgaggctatatgatctaggagctcggaaggttctagtgactgggaccggaccaatgggttgtgttccagcagaattagccatgaggagcccaagtggtcagtgtgtcactgagctgcaacgagctgcaaccttgtataatccacacatgggtcaaatgataaatg

SEQ ID NO: 1606 - DNA, 429 bp, Gossypium hirsutum
  unsure (1)..(429): unsure at all n locations; Clone ID: LIB3493-045-P1-M1-B11
cgaagctctgagaagctacagtgaagttgctggtaaaaactaccctgctgatatgtttattcaatgctggagagagatataaaccacagtgaagttttgagtggaatatgggactgngttggaagaaaagattttcagtggatgacacaatacaagtagtggaggacattgaaaagcaactattaagaggattaatcgctgagatttgtgcataagtgtgtggttttaccaacttcttgaatgttggttctgcagatctgcacattcatagcttcaagaggtcggtgatgcagcaatggtaaataagctntactttggttgaaataaaggggcagagttgaacctgtttgcccatttctcccattgaaaaatcatattttcattgctgtaattgacaaaatgtatatttaggcttcaaccacttaaaat

SEQ ID NO: 1607 - DNA, 298 bp, Gossypium hirsutum
  Clone ID: LIB3493-045-P1-M1-B12
ggaaaacggtgcaagtttgagaattgcggcaagagtgcccaagaagcacgatgatgcaaggcccatggtgggggaaaaagatgctcctggggagaaggcaatgcagaattgaaggggcaggagtggtctatgtgcagctcacagtagcatgttgcaggagaggcaggcaagcaagggagggctcattgcaccaggagttttccatggtcttgtatcggcaacatcaaccacaagaagcagctccaacaacaatcactcatcttcaagcaataatgtcatttctgattgcatcgattca

SEQ ID NO: 1608 - DNA, 520 bp, Gossypium hirsutum
  unsure (1)..(520): unsure at all n locations; Clone ID: LIB3493-045-P1-M1-B2
acgagccgtagtgcgccgtttgcatcaggaagaaatggcggtccctttgctgtctgagaggattgtgaagaagcgtgtcaagaagttcaagaggccccaaagtgaccgcaagatctcgcaggtttttattttatttttattatttagaaaaaatatatatatattttttctgatctccgctttgttatttactttatttctcaatgatacgttctcttcagtttgtcttatttttaagaacccatttattcaaagcttattaatagttgtaattgggttttactctggttcattgctcttaaaaaaacttaacaacacttgaaaaggtcgcacttcttttattagaatgctctaggctgcatttgggaacttatatttcaaaaacagtgtcatgagacacttaanaatgtaatatttcatggttattcttaaaatcatgtatttgttggatgcctatttagtggtgaatttgaaattcatgtttttatacttttgaactataatcatattgaaccatgac

SEQ ID NO: 1609 - DNA, 400 bp, Gossypium hirsutum
  unsure (1)..(400): unsure at all n locations; Clone ID: LIB3493-045-P1-M1-B3
cagcgacagttcgagtcttattgcagctaattctaacgttgcagtggcaaataaaagcaggaactatagttctacaggcggcatggcggaggcggtgtcngcagtaacgtctcattaacaatataaatgtaagcgagtcgaagttgtatggaaaccctaacaatttagtcttcgaggcaggattactggaacaaggatcagaatcggggatttttccggagattgggagttttacgagcttggttacttcgtcaaacaatgaaacgtcgtcgttgggtttcggtgcggtattaaatgggcaaggacagtggcagcagcaaaagatgatgagtgttggaggggaggaaatcaccggggaattgctcgatcagacgatgcaggttgagctttcaaatttgca

SEQ ID NO: 1610 - DNA, 92 bp, Gossypium hirsutum
  Clone ID: LIB3493-045-P1-M1-B5
cgccacgcgtcctgaaaacctatagaaatcatccctgttcggccgactcaagaatctgcgcggtcccaccaccactgcgatcggtggagaac

SEQ ID NO: 1611 - DNA, 111 bp, Gossypium hirsutum
  Clone ID: LIB3493-045-P1-M1-B6
cttaccacagttctccatcaagattgctttcacctttgtagtccatccatctctaatccttgcatatataagacatgctgcatatctttcaaagcatcatattctctaaac

SEQ ID NO: 1612 - DNA, 350 bp, Gossypium hirsutum
  unsure (1)..(350): unsure at all n locations; Clone ID: LIB3493-045-P1-M1-B7
aaaattgtttgatttcttctaattagtgaatcatatggctagcactatggccggcaggcttcatatagtgtggtctttgcttgntttnggtcccccctggctaaggcctaagttgtggccaaatcatatcagccttggcaccctgcattccttacgtgagaaacaactgtgcttgtggcctgcctgcaccttgctgcaatgggatcagatctctcaacgcggctgcccaatcaactccagagcgccaatcagcttgcagctgcgtcaaagcattagctgccaccatttctggcatcaactatgaccttaccaacaaactcccaggcatgtgtggggtgcacagccctttc

SEQ ID NO: 1613 - DNA, 381 bp, Gossypium hirsutum
  Clone ID: LIB3493-045-P1-M1-B8
cggacgcgtggggcatcttattatattcaacaaagaggcataactgggtcaggggggcatgtatcacaagacattcatatgttatctagtccaaatgtacaataccaatcaagtatagtgctactactatgggacctgtggagagtagtacccctcatagtgtcaatgtaggcacaccttcagctgttccatctagtgagaccacgaaacggaaaagaggaaggcctcgaaagtactgtcccgatgggaccgtttcattggcattgactcctccatcggttactaatcccaggacattaacaccaccgagtcaaaaacgaggtagagggcgaccacccggtactggaaagaagcaacaacttgcttcccttggtgtatggc

SEQ ID NO: 1614 - DNA, 370 bp, Gossypium hirsutum
  Clone ID: LIB3493-045-P1-M1-B9
ctctctttttcctctcaatctctccgtctagggttttctcttagttctgactaagatttcaaaaagaaaaataggatgtcaagtgctttagagatgtcgctagacgacctcatcaagcgcagccgtaaatccggatccggaaactcccgcggtcgcggtcgcgggcgtggatccggacctttacctgcccgccgatttcctaaccgacgcgcaaatcgctctacaccgtatacgacagctaaggcgccggagacgtcgtggcaacacgatatgtattcggataagggagcggcgttcctaggacaagcaggtcgggcctccgcaatcgaaactggaacgaaactgtgcatgtctaatttacaatatggcg

SEQ ID NO: 1615 - DNA, 136 bp, Gossypium hirsutum
  unsure (1)..(136): unsure at all n locations; Clone ID: LIB3493-045-P1-M1-C1
aattccccaaaccacccacccctcccaatgatctcaagttcatttttnagctctacaaacccagtttttgtaatcttcaagttagcaacaacacataacatcagcgtggcctttcaccttaaaactacttcaccta

SEQ ID NO: 1616 - DNA, 309 bp, Gossypium hirsutum
  unsure (1)..(309): unsure at all n locations; Clone ID: LIB3493-045-P1-M1-C11
acttgtcgttgcttctgcttggagaaaacaaatgcccaaactccccgtttcnctgggcctcttcgatcagatgcgctgacatgattnaanaattgatcagcaagggacagcagcttgatgcagttcattttacttatgaagttggccttgtggacaagttgggggctgtgcccctgctgaaatctttcttgagggatgcaaagaaggcatcatcttctattttagatgatcccaataatactggcctggctgcgcaacttgctgcacgcaaagagcaatctgcacttctggctgtcatcaagtgcattg

SEQ ID NO: 1617 - DNA, 196 bp, Gossypium hirsutum
  unsure (1)..(196): unsure at all n locations; Clone ID: LIB3493-045-P1-M1-C12
gggaatttaaggataagatcgaaggggttggagctatggatcatcancatttnggccctctcataactaactatggtagtacggatcacaagcttcttgtttatgattacatgccatgggaagcttatctgcgcttttgcatggcaataaaatcgcaggggggggctccactcaactttttttttttttctcgaat

SEQ ID NO: 1618 - DNA, 138 bp, Gossypium hirsutum
  Clone ID: LIB3493-045-P1-M1-C2
ccaacactcgccatgggtttaccagcaaagtgcagtctcgatatgccttctgattggtgagtaaggtataccatgactccccgattacgcgcctattacattatcgacctattctggctgtggttcccctgtttttct

SEQ ID NO: 1619 - DNA, 228 bp, Gossypium hirsutum
  Clone ID: LIB3493-045-P1-M1-C3
ctcattttctctaaaatctaccttccatatttccttcggactgctaagaaagttatttgtgaacaactaaattttgaaaaactcgttttccttttttgcctttcccccttgacgatctcaatattaaaaaataaatcaagcaatttcccgcacggcaagttgggtgggatccatatttataaattttccccactttacctcataaaaaaacaaaacaaccacccatta

SEQ ID NO: 1620 - DNA, 97 bp, Gossypium hirsutum
  Clone ID: LIB3493-045-P1-M1-C4
ggccggtcccacatttacgcaacgcaacgcctcattgaacaacgaaagctgccgtgggggggggttttatagagggggggctaaaaacaagaatagt

SEQ ID NO: 1621 - DNA, 96 bp, Gossypium hirsutum
  Clone ID: LIB3493-045-P1-M1-C5
gcgccacggaatcgagagctccaagtgggccatttttggtaagcaaaactggcgatgcgggatgaaccggaagccgggtcggtgcccaactgccct

SEQ ID NO: 1622 - DNA, 198 bp, Gossypium hirsutum
  unsure (1)..(198): unsure at all n locations; Clone ID: LIB3493-045-P1-M1-C6
aaaagatttttccaattcctttttggtagaattttttatttctcgattcgatttcgggtgtgtttcttggtatggtttattgagactgcantccttggatggtacattgagaaatatagcagagcatgaacactcttgagattagggggccttctcttaggggatatcgaaagagaaaagcaatgcttgatcttaatg

SEQ ID NO: 1623 - DNA, 70 bp, Gossypium hirsutum
  Clone ID: LIB3493-045-P1-M1-C8
acaaatccacccactcgtcctcaaaacaaatggtgagcatggctgccatcggtgatttgaggttgccttc

SEQ ID NO: 1624 - DNA, 414 bp, Gossypium hirsutum
  unsure (1)..(414): unsure at all n locations; Clone ID: LIB3493-045-P1-M1-C9
cgccaatggcttagccatgtattccgccatctgccaacaatgtggcttagtcgcgagggtcnaacccgaaatccttggtgatggaccacacgacattaacaagtgtgctgcggtaccgagcgtgtccctcgcagctttgctacanaagctctaaacgaccaccagtgtgatgctcgaaggtacattgttgaaacccaacatggtgacacccggttccgattccccaaaagttgcacccgaggttatcgccgaacacacggttcgtgccttacaacgaaccgtcccacctgcagtccctgcagtagtgttcttatctggtggacaaagtgaagaagaggctaccgttaacctcaatgccatgaacaagctcaagaccaagaaaccatggtcactgtcattctcatttggacgagc

SEQ ID NO: 1625 - DNA, 160 bp, Gossypium hirsutum
  unsure (1)..(160): unsure at all n locations; Clone ID: LIB3493-045-P1-M1-D1
ccctcccggggctttagggcctgaagataattgttggccccaaatggcccgaatggtgcctacttganaagatcatttaaatggggagggtgatctacctttcacacatccacgcananatctatatttactaaatgcatgtgcgtggatatacaaccca

SEQ ID NO: 1626 - DNA, 90 bp, Gossypium hirsutum
  Clone ID: LIB3493-045-P1-M1-D10
cgaaatatttcctcgctctctcttttatcctcactttctcagccatcaaagggggggttttttcttaagggggaaaatgcaatgtgagat

SEQ ID NO: 1627 - DNA, 372 bp, Gossypium hirsutum
  unsure (1)..(372): unsure at all n locations; Clone ID: LIB3493-045-P1-M1-D11
gcccctcactcgtcttctgccacttgctcttggtcttttataccttgngaagcgggagaatattaaagcgactgcggaggtctcaaagacgttcaatgaaaaaataagaaaatatgtgatatgacactactttcttgtgcttatgctggaactgggaatgttctgaaggtccaaaaccttcttggtcattgtgctcagcatcttgaaaaaggcgaaacccaccaaggtccagctgtgcttggtatcgccatggtagcaatggctgaagaattgggtcttgatatgtcaattccttcactagagcatcttttgcagtatggtgagcaaaatatcccgtctgcagttcctttggctcttggtcttctttgtata

SEQ ID NO: 1628 - DNA, 417 bp, Gossypium hirsutum
  Clone ID: LIB3493-045-P1-M1-D12
ggaaattagagtgaggaacaggcaaaggaagctttacacaaacagtccagggtgatggtggcctagttataaacaaaccatgtggagtcacatcgtgtttgaacatccagctacgttggaaacaaatggcgttggaacccagataaagaagaaagagattattgagagatcttgttacttttagtgataagtaagagttttatgctaggattggtaaagcttggaaacgtgggtatcttctttatgggaccaccaggactgggaaatcaactatgattgctgcaatggcgaatttgttgaattatgatgtttatgatcttgaactcactgctggtaaaaataatactgagttaaggaagcttttgattgagaccaccagtaagtcttatatagtgattgaagatatagattgttcac

SEQ ID NO: 1629 - DNA, 452 bp, Gossypium hirsutum
  Clone ID: LIB3493-045-P1-M1-D2
ttttgttttgcttttctcttgtgttcttgcaatttccttttgtgtttggggtaagccggctacttttcttgatgattggcggattacttggtctgattcccatattaggcaaattgatgagggaaggccatccaacttgttctagaccaaaattcaggctgtggagttgcttccaaaaggaattatttgttcggacgtgtcagcatgaagatcaagcttatacctggtgactccgccggaacagtcaccgctttttatatgaactctgatacagatacggtaagagatgagctagacttcgagttcttgggaaatcgtagcggccagccttatactgtccaaaccaatatctatgctcatggaaaaggagatagggaacaaaagggtaacctttggtttgatccttctgcagaattccatacttacactattaatgtgaaatcatcatcata

SEQ ID NO: 1630 - DNA, 449 bp, Gossypium hirsutum
  Clone ID: LIB3493-045-P1-M1-D3
ggaatcacttggtgtcccatttcctaagaaccagccgatgagaatttactctagctggtggaatgcctatgattgggccacaaggggtggtttggttaaaaccgattggacccaagctctttcactgcttcttacaggaacttcaatgccgatgcttgtgtgtggtgcaatggagcttcttcttgcaaatcgaatacttcaccgtcttctgcatcgacaaacagagcatggttctctcaagaaatggattcagcgaagcaacaaagattgcagtgggtacaaaagaactacatgatatacaattactgcaatgatgctaagagatttcctcaaggtctacctccagagtgcaatatgtcttaaaagacttgaagatccgattacagaaaattattttagagattgatattcaatattcttttaatatttatttttctttaattcaaaac

SEQ ID NO: 1631 - DNA, 251 bp, Gossypium hirsutum
  Clone ID: LIB3493-045-P1-M1-D5
ccttcatcttcattattggttcaaaatctaaaatcaaaagcaaattttccataaaagggtacatattaacaccccaaaacaaaaaagacctaaaaaagagtttcattcgcatctttttctttaattccataacttttgccttcttattaaccattatctttttttccttcaatacttgcccttcttaccaccaaaaaacatttctaactttaaattcatccttaaaagaaccttatttacgcatcttccat

SEQ ID NO: 1632 - DNA, 99 bp, Gossypium hirsutum
  unsure (1)..(99): unsure at all n locations; Clone ID: LIB3493-045-P1-M1-D7
tgtgagagagagaggagtgtgctattntctaangtgcantttggagtggttttgatggtggaaatagtacaaggatgctgttgatctcantcatggtcc

SEQ ID NO: 1633 - DNA, 234 bp, Gossypium hirsutum
  unsure (1)..(234): unsure at all n locations; Clone ID: LIB3493-045-P1-M1-D8
cgatttcgtctaagatctcagttctcaaatcgtagcgctcttttctatcaagccgtngctcttatctaacatgcaggaaaaacaaacaaaaatgcctttaaggcactcattgctcagaatatagntggtgtgcaggtcaaaatggttgaagaattttgagagtgggtgtgtcaaataatatcttttttttttatcaacattaaccataaaaaaaaagttcctttttttctaaca

SEQ ID NO: 1634 - DNA, 368 bp, Gossypium hirsutum
  unsure (1)..(368): unsure at all n locations; Clone ID: LIB3493-045-P1-M1-D9
cacaatgataagtcccaacgcatctcagtaacctccacacccaacattattggaggcgcacaaaacgagtcactatgccccaatcgaccacaatagaaacagaaaagggatagacttcatagnttaaacctgacataggagcatctgtcattaaacaaaactgggtgtttcctcttcaagtatcttctgatatcaagtttggctctaattcgcatgtaatttcggtttcccttccctatgtctaatccatcatattctaggaaatcgcctaggagattgctctgttaatttttcagagaataagccaataaggacgtcgtggatttgaacccaaaatggactataaaataatggaacttttagtgggt

SEQ ID NO: 1635 - DNA, 349 bp, Gossypium hirsutum
  Clone ID: LIB3493-045-P1-M1-E2
tggagagttaaaatgctgtactcttgttgttcattgattctgtcaatgaagagtcaagtgaagtattatactacgatggacatgcggctacggttccaagagaactcaaaaaagaatagaaaagactaggagttggaaagaaacaaaaaaatgaagtggaagcagcgggtgaccggaggttcttaacctctctattgtatgatatacccaaagcctcatctttttatcatgttagcactgaatgatctttgttaaggcattgtagtaactgaaggaatttaccttttctataatttgatactatctttaatgatactactttttattgcaaaattcatattaacaaata

SEQ ID NO: 1636 - DNA, 102 bp, Gossypium hirsutum
  unsure (1)..(102): unsure at all n locations; Clone ID: LIB3493-045-P1-M1-E3
aattaacgcagccaaatcgtttgagccgatgaaccctttctgcagagttgtcttagggccatcatatctataccggggatgtattatntacttaccatcatc

SEQ ID NO: 1637 - DNA, 121 bp, Gossypium hirsutum
  Clone ID: LIB3493-045-P1-M1-E6
aaagtatgcgagcagtgttcgaagaatggttcatccatcacaaagttgatgtaatcgtggggtggtcatgtacatgcttatgaaagatcctatcgaatctcaaatataaggtacaatgtat

SEQ ID NO: 1638 - DNA, 63 bp, Gossypium hirsutum
  unsure (1)..(63): unsure at all n locations; Clone ID: LIB3493-045-P1-M1-E7
tccacccacccgntcctcttaaccttnctttaagctctatgtcttataataccatcataactc

SEQ ID NO: 1639 - DNA, 211 bp, Gossypium hirsutum
  unsure (1)..(211): unsure at all n locations; Clone ID: LIB3493-045-P1-M1-E9
tcttcctgttgggcatttacatgcaaagatcatggatcgttttactccntttttgtttgttgttnttaccctaaaacatattggctaccccccttttaaagctattangacagccttactattggcctattatttcnnngtgctgccttcaccaccccccctctactatctggggggggggggcgccccccccccttttattttttttttt

SEQ ID NO: 1640 - DNA, 369 bp, Gossypium hirsutum
  Clone ID: LIB3493-045-P1-M1-F1
gcgtcaacaaaatcgcacgcttgacccacatattgaggaacaatttggcagtggtcggctggtggcttgtatctcttcacggcctggtcaatgtggccgtgcagatggatacatcttgaggcaaagagctggagttctacatgaagaagatccagagaaagaaggggaagggagctgcttaaaaatttattgcatgagttttcagctttcatatcagaatgccgccctgagtttttgcctttcacatttccagaacatttaaaattgtgttagcattgaacttttaatctggatccctgagagttattatttttgtattggaatttagattatctttgaactttataaatgcagcttattttggttggt

SEQ ID NO: 1641 - DNA, 143 bp, Gossypium hirsutum
  Clone ID: LIB3493-045-P1-M1-F10
ccaacttacaggaaaggattttacagaagcatttgatgcagcttgctttcctgtagtctcttctctagctcatttgatgctggttgggcttctgggatctcagctacaggatccaagtttgttggatatgttggtggaggggg

SEQ ID NO: 1642 - DNA, 372 bp, Gossypium hirsutum
  unsure (1)..(372): unsure at all n locations; Clone ID: LIB3493-045-P1-M1-F11
gggttttagagttcctggaaattatgtaaaggggatagcctgtggaggacgacaganntgcttatatcacagatgctggagcagtacttactttcngttggggactctatggacaggatcaatatgtannngtaaagtaggagaatttggtggagaaaaaaagccccagtgggagtttgaaaatnaaagtttttattctaataaagggatattctttctaaaattacttttctaatattttctctcctctaatttattgtgatatatgcttgttctatcttctaatacattgtgatatggagttaaattgtttccattttcttgttttctcaagtgtcggccaagaactacaaattatgaatttaaccccaa

SEQ ID NO: 1643 - DNA, 453 bp, Gossypium hirsutum
  Clone ID: LIB3493-045-P1-M1-F12
cttttgcaaaactaatataccggatgaggtcactgctgccttagagcctatcgagggcaatgatgaagcagggagagcctatggaatccacctcggaacagaaatgtgccgcaaattttagctcatgggattaagacgttgcacctttatacattaaacatggagaaatctgcattagctatactaatgaaccttggactgattgaagagtccaaaatttctaggtctttaccttggagacgccctgcaaatgtcttccgtgttaaggaagatgttcgcccaatattttgggctaaccgtccaaagagttacttatctaggactattggttgggatcagtacccacaggggcgatggggtgattctcgaaatccatcgtatggtgcactatccgactatcagttcatgagggcccgtgcacgtgacaagaaacttcaggaagaatgggcttct

SEQ ID NO: 1644 - DNA, 615 bp, Gossypium hirsutum
  unsure (1)..(615): unsure at all n locations; Clone ID: LIB3493-045-P1-M1-F2
ctcaatggtatgctacttaatgacaaacaagtttttgttgggcctttccttcgtaggcaagaaagagagtcatccataggcaaggcaaagtttaacaacgtctatgtaaagaatctatcaagtcaacaactgatgaggatttaaagaatgcatttagtgaacatggacctataactagtgctgtcattatgagagatgcggatggaaagtcaaagtgttttggatttgtcaactttgagaatcctgatgatgcagctcgttctgttgattctctcaatggaaagaagtttgatgataaagaatggtttgttgggaaggctcagaagaaatctgaaagagagatggaactgaaagggcagtatgagcagaccttaaaagaaacagcagacaaatttgcaggactggatttatatgttaaaaatctagatgatagcatcaatgatgataagcttagggaatngttctcagagtttggacagtcacttcgtgcaaagttatgcttgaccctaatggcataagtagaggctcaggctntgttgccttttcaactgctgaagaagcatctcaagctctcatggagatgaatggtaaaatggtagttagcaaaccacttta

SEQ ID NO: 1645 - DNA, 461 bp, Gossypium hirsutum
  Clone ID: LIB3493-045-P1-M1-F3
ctctctctctctcgtattagaaattagacactactagacttgtagaaatgcaaggggtcggcttgttgccggtactgctttgcgccacctaccatatcgctctttccgcgaacaacgtacggtggcggacggtaagaatttacatatataatatatacatatatggacacaggagtttttacttttgaattaaaatttcgagcaaagtaattttgtttattttgaaagcacagttaataaaaataaataaacatctctactttctcttcatgaatttttggttggtatcaggaaacgtagcaagtagtatggttagttgttactcagttaaaaatagatttaaaattgttattgtcataaataaaaccaaaattttaataaaagaatatgcttactaggatttgaaagattgaactaatattttattggtttgattaaatcatgagaacttaatttaaaac

SEQ ID NO: 1646 - DNA, 284 bp, Gossypium hirsutum
  Clone ID: LIB3493-045-P1-M1-F4
cctaactctccaactgttgtttccacttcctctcttccagatctgaatcgcaaaaggggaggttcagttgaaaaagatgggtcgcggagttagcaatggcggtgggcagagctcattagtatttgtttggtagcggaaaagctcctaaacccaggacaaacaactgccaagctgctcccgctgtatcaccagctgtctccaaacctggccctgctcctgaaccagtagatatttccaagcaaattcctgctggtattaacagtatttccccaaacaattacatg

SEQ ID NO: 1647 - DNA, 175 bp, Gossypium hirsutum
  Clone ID: LIB3493-045-P1-M1-F5
gattcgcgattatgggaatcgaaataagccggggcactatcattcacaggaggttggggggcctcccccatggctgtcgcggctaaacatcactcatgtaaatcatccgcggcagctatcttttgtcccactggtggggggcttttcatctttttttttttttccaatttccatt

SEQ ID NO: 1648 - DNA, 132 bp, Gossypium hirsutum
  unsure (1)..(132): unsure at all n locations; Clone ID: LIB3493-045-P1-M1-F6
cccacgcgtccgccggtgaaagctccgacgagatttttggtggatatttgtatttcgacggagcaccaaataaggatgaattccatcaanaaacatgccngaagatcaaagcccttcactgtatgaattgct

SEQ ID NO: 1649 - DNA, 327 bp, Gossypium hirsutum
  unsure (1)..(327): unsure at all n locations; Clone ID: LIB3493-045-P1-M1-F7
cggactcgtgggaaaaaagagagatggcgtctgtaataaaatctgcaatcttagtggtgtcngtgttaatatctgtacgcttcanttcngatgttaggttgctccaagaacacccatgatgaccctcaaaacatggacgctattcctcccattgatgcactcaaccctaccgagttgaatgtaccctgtgttggcattcacaaagatcatgttgtcccaaaaggtgctgaaattggtactcttggttttggttntcaaggtggtcctgataaatgttgttcttctggatgttccggtaattgtaatcctggtggtttccttctacca

SEQ ID NO: 1650 - DNA, 330 bp, Gossypium hirsutum
  Clone ID: LIB3493-045-P1-M1-F8
gcaagcaagacgaaaatggcgccagtactgcagagctcccaaccttgggttgaagaatatctgccaaagcaagtgagagatgtggcacatcaagacgaggttgttcgagttctcacaacactcctcgagacctgccaattgccccgcatatgcctcttttacggtggcggctggcactggcaaaactactaccgctctcgccattgcccaccagctatttggacctgaactctacaaatctagggtgttggaactaaatgcaagcgatgaccgtgggatcaatgttgttcttacaaagatcaaaaatttttctgctgttgctgtactatc

SEQ ID NO: 1651 - DNA, 450 bp, Gossypium hirsutum
  unsure (1)..(450): unsure at all n locations; Clone ID: LIB3493-045-P1-M1-F9
cggacgcgtgggcggactcgtgggtttcaaacaatcatgtcgattcatatgtggtgtctgaatcaagcctatgtggctacccatacaaaatcatcataaagacttgtggcactacaaattgnctcttttcaaatccctgcttattctgaaactggccaacagcgctgtcactttctgtacagtctgttatgtacagtcgtgggagctacatatttcctggggcacaaccatttccacaccgtaacttctgtgaggaagtagcaatcctcgatcgcttttttcttaagcttgggtctcataaaaaggcttatattatgggtggttctgataaaacaaagaaatggcatgtttattcagcttctgcacgaaccagtagtcattcaaatcctgtgtatactttagaaatttgcatgaccggttttgacaggaaaaaaaccctttatcttttac

SEQ ID NO: 1652 - DNA, 450 bp, Gossypium hirsutum
  unsure (1)..(450): unsure at all n locations; Clone ID: LIB3493-045-P1-M1-G1
ctgcaattggcaaactcatgtttgctcaattctctgagcttgttaatgattactacggcagtgggttaccttcgaacttgtcagcaagccggaacccgagcctggattatggttaaggggcggaaatcgcgatggcttcgtactgctctgagcttcaatacgggggcaaccctgtcaccaaccatgtgcaaagtgctgagcaacataaccaagatgtgaactctttaggcttaatctcagcaagaaaaacagctgaagctattgacatattgaagctcatgtcttcaactttcttggttgccttatgccaagccattgattngaggcatttggaagagaatttgaagaacactgtgaagaacacagttagccaaatggctaaaagagtcctaacaatgggatccaatggtgaaactcacccatcgagattctgggaaaggaccttctacg

SEQ ID NO: 1653 - DNA, 114 bp, Gossypium hirsutum
  unsure (1)..(114): unsure at all n locations; Clone ID: LIB3493-045-P1-M1-G12
cggacgcgtggggcgaaaaaaagggaattttagtcttcaggggaacgatcgagcggtntcttacctactaacggggctgcactcannatnnnccntanatcangccatcttggc

SEQ ID NO: 1654 - DNA, 95 bp, Gossypium hirsutum
  unsure (1)..(95): unsure at all n locations; Clone ID: LIB3493-045-P1-M1-G2
ctgacgcttgggcggactcgtgggttgatcttctagtgaagaagtatctaatgttnttgaatcttttataaaaaatgattgtttaaacctacata

SEQ ID NO: 1655 - DNA, 101 bp, Gossypium hirsutum
  Clone ID: LIB3493-045-P1-M1-G3
tggaaaggtattatgaagcattggatattatcaaacttgtattaaaatcaagtcatgactggttccctgttgagaagcagcagcagcttccatcacttgga

SEQ ID NO: 1656 - DNA, 134 bp, Gossypium hirsutum
  unsure (1)..(134): unsure at all n locations; Clone ID: LIB3493-045-P1-M1-G5
atgatatcaaggctccatcagttnttacttccagaaatgtggggaagactctcgttggcggtactcatgataccaagagtgcttcagaaagactcanacaccgtgtgtttgaggtttcatgggcttgatctttc

SEQ ID NO: 1657 - DNA, 521 bp, Gossypium hirsutum
  Clone ID: LIB3493-045-P1-M1-G6
gggtattccataatgttttctgacatgttccctttcatgttagcatctcagggatcttgggacgaactgaacaagcttctgaaggagcctgtacccatgaaccgtttcagacccccatcttgttgacggctgtgagccgttctctgaagacctatggactgagatgaaaataagccaattttcatttcaaggtgtgaggctatgctcccgctgtaaggtgcctacaatcaatcaagacaccgcaattgctggtccagagccgaatgaaactcttatgaaatacaggtcggataaggtcttgcgaccggacaagaaacaacaaggaaagatctatttcgggcagaacatggtttgcaaggaaagtttgactgaagggaaggcaaagctggttaaagtgggagatcctatatttgtcctccagaaagtctccactgctgctgaaagcagtgcttgaatgccttaacagtattcaaataaataagagccataactcattatctgagactttaaatcaagttttc

SEQ ID NO: 1658 - DNA, 178 bp, Gossypium hirsutum
  Clone ID: LIB3493-045-P1-M1-G7
ctaatttgtgttgatgcagagcacatacaaatgactactattttcatatcacaaataatcagcacaccacctagttaaaataaattcaagcgcatttgtgaaaaatctatgatcaacaatcgatggatgtaccttacagattttatttttttagaaaatcccaattaaataaaataca

SEQ ID NO: 1659 - DNA, 106 bp, Gossypium hirsutum
  unsure (1)..(106): unsure at all n locations; Clone ID: LIB3493-045-P1-M1-G8
caggaaggtgaatcangttgctgacaaatattgggatctctattcaagtgagtcagttgatctataaaaagtggacacctactcccttaccccatcgtgttctata

SEQ ID NO: 1660 - DNA, 337 bp, Gossypium hirsutum
  unsure (1)..(337): unsure at all n locations; Clone ID: LIB3493-045-P1-M1-G9
cgcccaagtagaagggaacacagaggcagagcaatctgattcagaaaatggagtcgtncgttcactaaatattggcgatagcaagactcttttcacatcactttattcccttcgccgtcttccatctnccattcactttctgttagaaattcggttaaaagagctggcgagggactgctgttgtattttcttatgcactctcttgcaataatacaagcctgtacaagagacttacgcttctattggagctaaacacggtctgaaattcaattcacctgcaataaagaaaggatccaaaagggcttttcctgctccctggccttccttaacctccctc

SEQ ID NO: 1661 - DNA, 307 bp, Gossypium hirsutum
  Clone ID: LIB3493-045-P1-M1-H1
tgacattccaaaagaaattccagatcctgatgctaagaagcctgaagattgggatgagtggagaagatggtgaatggacaccttcaactattcccaatcctgaatacaagggcccatggagcaaagaaaatcaagaaccccaactacaagggcaagtggaaggcagcgtgattgacaaccctgattttaaggatgatccggatctctatgatttccccagcttgaagtatgttggtattgagttgtggcaggtgaaatcaggaacaatgtttgataacatcttacttgctgatgatgtagaatatgc

SEQ ID NO: 1662 - DNA, 320 bp, Gossypium hirsutum
  unsure (1)..(320): unsure at all n locations; Clone ID: LIB3493-045-P1-M1-H11
tggaatcgtagcttgtctctccaatcctatcaaggtcctgtttgcatccaactagtggtttccaggacctaggctttgatagttaaaataaaaaccactatgggttttgctggtataagttaataagttggtttttgttgncatttnttnnncctaattccaacactgagagctcacatcgctgaatatgatgagtattggaaagcacgagaattggaagccattgaaaacctgaacaaggtttatcaccccaatccggaggaggtggtccggcattacaatgaccactctgtcaataccatgcttgagtatcataacac

SEQ ID NO: 1663 - DNA, 445 bp, Gossypium hirsutum
  Clone ID: LIB3493-045-P1-M1-H12
aaaaaaagagagatggcgtctgtaataaaatctgcaatcttaattctgtcggtgttggtatctgtacgcttcagttcgggtgttaggttgctccaggaacagcccaatgatgacccaaaaacatggacgctattcctcccattgatgcactcaaccctaccgagttgaatggacccggtgttggcattcacgaagatcatgttgtcccaaaaggtgctgaaattggtactcttggttttggttttgaaggtggtcctgataaatgttgttcttctggatgttccggtaattgtaatcctgggggtttcgatctaccattttcttaaattccagaaattccaagaattccagaaatcccacaaatcccacaaattccacaaatcccacaaattccactaaatccacaaatcccacaaggccccacagatcccacaagttcccaaaa

SEQ ID NO: 1664 - DNA, 534 bp, Gossypium hirsutum
  unsure (1)..(534): unsure at all n locations; Clone ID: LIB3493-045-P1-M1-H2
ctttcttctccatattttcctctgtggagaacccatccccctcctttagggtttagcaggtaaaaatagaaaaacaaaagtatggcgaccgccactgtccccgccgccgcaggcagctttcctaaagaagccgacatccaaatgatgttggccgccgaagtccatctcggtaccaaaaactgtgacttccaaatggagcgttacgtcttcaagcgtcgcaatgacggaatctacatcatcaaccttggcaagacctgngagaaacttcaacttgctgctcgtgttattgttgctattgagaaccctcaggacatcattgtccaatctgcaaggccctatggtcagagagctgtactgaagtttgcacagtacactggttgtcatgcaattgctggaaggcacactcctggtaccttcactaaccaactccagacatcgttcagtgaacctcgtcttcttatcctcacagatcccaggactgaccaccaacccaataaggaagcagctcttgaaaacattccaaccattgctttt

SEQ ID NO: 1665 - DNA, 452 bp, Gossypium hirsutum
  unsure (1)..(452): unsure at all n locations; Clone ID: LIB3493-045-P1-M1-H3
cttaaattgccaatgggttgggatgggaagcctatcccttactggctttacaaactggatggtcttggtcaggagtttaagtgcgagatttgtgggaactacagctactgnggtcgtcgggcttcgagagggcatttcaaagaaatggcggcatcaacatggcatgcgatgcctnggtatccctaacactaagaacttcaatgaaataaccaatattcaggaagcacaagaactgtgggagaagataagagaacggcaaggagtgaacaagtggcgtccggatcttgaagaagaatatgaagataaagagggcaacatctataacaagaagacgtataccgatctgcagcggcaaggactgatttaaagacgcttccgttaagaaacggagtgttttgtgtttgacatggtgcgtatcgctgctatggtttccttggtcatcatgtatgtat

SEQ ID NO: 1666 - DNA, 400 bp, Gossypium hirsutum
  unsure (1)..(400): unsure at all n locations; Clone ID: LIB3493-045-P1-M1-H4
cccacgcgtccggcgacatccatagcagctcgcatctccaggaaggccgcggcctctgctggtctccgctcaccgtcacgtaatctcatcccgttgtttcgccacggagtcggcgaaacatctcgccgtcgtcggatcgagtcaagtgggactacaggggccaaaggaggataatccctctcggacagtgggtccctaaggtcgccgtcgacgcttatgtggcacctaatgtcgtcttggccggtcaagtaaccgtctacgacggagcgtcggtgtggaaacggtgcgtnctacgtggcgatctcaacaagatcaccgttggattctgctctaatgtcccagaacgctgcgtcattcacgccgcttggtccttacctaccggacttccagccgagaactt

SEQ ID NO: 1667 - DNA, 230 bp, Gossypium hirsutum
  Clone ID: LIB3493-045-P1-M1-H5
cgaaaaaggtaacctcggtaacaataattgctcgttactaatgcccgaaaccacagcctagggtgctcgcttagcccaatgaaccgtgaaagaataaccaactgagcttgactcttatcactttgtgaaaaaacttgccaggtgtaagataaataggctctcttgggcgagatttaaataccacttcttttaaccgtattttacttattccgagaataggaggccgggca

SEQ ID NO: 1668 - DNA, 474 bp, Gossypium hirsutum
  Clone ID: LIB3493-045-P1-M1-H6
gattgttgttccaactggtacggtattagctgtgaccccaccactcaccgagtcaccgacgtttccctacgcggtgagtccgaagaccccattcttcaaaaaaccggccactcatcttcgttacatgaccggtaccattaacccttctatttgtcagctcgaccggtcactacttaatcattgtgattgaaaggtatcgcgtgagaccatctgcttgcgtcgtgccactgaagtttgatctatgaattctatcggaaaatcaaccaatagaacttaaactaccgctgactactgtataaaaacgcaatccagctcatgtaacttcagtaaacactcattgacacacctctaccgcgaagtccgcaacttgaacctgaatgtggccggcatactgatgaaacaactactggacgatcccaactccatagcaacatgtaccggttagccgacttggatttatcgagaaacaaaata

SEQ ID NO: 1669 - DNA, 455 bp, Gossypium hirsutum
  unsure (1)..(455): unsure at all n locations; Clone ID: LIB3493-045-P1-M1-H7
gtaactataagcagttgtagttatcatgcgttacgcgtattccanaaggngtgtctcatgtgcttggacattgnatggcatgacagattacataatgngttggcccattaaacattaactggggagaacaatcacataatgacaacccacccaacctttgggaaaaagggggccaaggggaatatttntnntttttgggtgcctttgaggataaatggggcttatttatttgttttgggtcccttggaaccttaaactataaaataaggcctttctcattttttcattttcaaattcatccccaaaccaatcttttctctcttaagttatctcttcttctccccatttgagaaattcttaaagaaattctatttgattgtaaatattttgggagatagtaaaagttatcatctggcttttagtagccccgaggacgtaggtattaatttaaccga

SEQ ID NO: 1670 - DNA, 360 bp, Gossypium hirsutum
  Clone ID: LIB3493-045-P1-M1-H9
ttcagttgttaatctagaaccttcgatcacttgccagaaaatctcaacctcaggagcaaaaaaccctctataataaagcaaaaccctaaaccctagacgcctcttcttcatcttatataaccaacggaacacccttatttctatctctgtcagtccttgttctatatcaatttatagctatggctacggcagctctgcttcgttcattccgacgacgtgacgtcgctgcttctcctctctctgcctatagatgtcttactaacaatggcaagacctcagcgggaattaattggacaagtttttgtagagcattcaattcaaaaccttgccgcaatgatgtcattggtattgatttgggta

SEQ ID NO: 1671 - DNA, 336 bp, Gossypium hirsutum
  unsure (1)..(336): unsure at all n locations; Clone ID: LIB3493-046-P1-M1-A10
gcagcagcagttgatgatgagcccatcaaatccatttggtgatacagggggcgggcatttccggtgaaccaagtggcctctgttggtcaaccacatgctaataatccatttggaagcacaggcctgttgtaatgttaagtgtgaagagttgggtttggggattntncctgcncnanttgntcactccctccattcattctaaaattggagcctaaattgaatactcggcttacctcgatgtcatttcacagccatacaaaatcctttggaaatcgaagtcaacgaggcactacaagaagttctatgcaaatcctttgacatcttttatttacttct

SEQ ID NO: 1672 - DNA, 360 bp, Gossypium hirsutum
  Clone ID: LIB3493-046-P1-M1-A11
ataatggatgaagcagaaaaaattcgagtgacgggtaaccgactcttcaaagagggaaaatttgaacttgccaaggcaaaatatgaaaaggtgcttcgggagttcaatcatgttaatccacaaacggatgaggaaggaaaagtgtttttagacacaagagattctttacatctgaatgtagctgcgtgcttcctcaaaatgggagagtgcagaaagtccattgacgcatgtaataaggttttagatgcaacgcctgtacatgcaaaggcactataccgtcgtggaatggcttacatggcagctggagatttccaggaagcaagatttgatttccaaatgatgatcaaagttgataagtca

SEQ ID NO: 1673 - DNA, 308 bp, Gossypium hirsutum
  unsure (1)..(308): unsure at all n locations; Clone ID: LIB3493-046-P1-M1-A2
atttgtactaagctcttagcatataactagctgctgctgttctacctcttctaaggtaggcttatttttccctactggactttttctttttctttttttgagattttcaagggaaaagaaaatgggtcgtggcaagatcgagatcaagaggattgaaaacgctacaaacagacaagtgacctattccaagagaagaaatggtattttcaagaaagcccaagagctcactgttctatgtgatgctaaggtttcactcatcatgttctccagcactgngaaatccacgagttcatcagccctaatatctc

SEQ ID NO: 1674 - DNA, 119 bp, Gossypium hirsutum
  Clone ID: LIB3493-046-P1-M1-A3
ttaacttcttccacttaaaagcaagttagctagctagggttttttgagccaaagggatgggttcgaaaagaacagcatcactagccctcctctttgactcacatcctcttcttttccct

SEQ ID NO: 1675 - DNA, 222 bp, Gossypium hirsutum
  Clone ID: LIB3493-046-P1-M1-A4
acttggtgaggggattttcacagtggatggggataaatggcgtcaacagaggagggtttcaagccatgaattctcaacaaaggtgttaaaagattcagcagtgttgcctttcggaaaaatgtggcacgacttgccaatatagtgtcggaggcacttaattccaatgagacaatggatatgcaaaacttgttaatgaaatcacttttgaattcaatattcaaa

SEQ ID NO: 1676 - DNA, 240 bp, Gossypium hirsutum
  Clone ID: LIB3493-046-P1-M1-A5
ttcacaatcctggagtggaggaggatcctgcttgtggaccactcatcgatgcgggggcgatcaaggcttaatatcctcccagacctaccaacaagaacatataaaaaatggtggttttgaagaaggtccttatatattccccaacactccatggggtgtcctaatcccacccaacattgaggatgataattcttctctccttgcctgggtagtcaaatccttcaaggctgtcaagtacat

SEQ ID NO: 1677 - DNA, 319 bp, Gossypium hirsutum
  Clone ID: LIB3493-046-P1-M1-A6
aagaaagatgatgaaaaggggttttattgttttggccttgacggtggttttcggcgcggcggtggttacggcggctgacgagagtgggtagcgaatgatcagcaaagatttccagagcgtgatgacttgcttaagctttgctcaaggaaaagcagcgtcgccgtcgaaggagtgttgtaattcagtggcggggattaaagagaataaacccaaatgtttgtgttatattttgcaacaaacacaaacttccggtgctcaaaatctcaaaagcttaggtgttcaagaagataagctgtttcagttaccgttggcttgtcaa

SEQ ID NO: 1678 - DNA, 303 bp, Gossypium hirsutum
  Clone ID: LIB3493-046-P1-M1-A7
gagagaacaaacaacaatggctgctacatctggggctgtactaaatggatgagggtgttcatttctttgtggggaaagaggagccaagcccttttggtgccagcattggggccaaaggctcgccctcccctactgctggaactagaaagttgatcgttgtggcagccgccgcacctaaaaagtcttggatccctgctgttagaggtgggtggcaacttcattgaccctgaatggctcgatgggatcctccctggagactactgatttgacccactaggtcttggaaaagacccagcattcctc

SEQ ID NO: 1679 - DNA, 182 bp, Gossypium hirsutum
  Clone ID: LIB3493-046-P1-M1-A8
caggatgacgataccggtttcagacaccgtggtagatgttgaatcattggtggcttcatggagaataggtgatgggcagtcaacttcgttatcactgattactggatctttagaacacccaccattctcttcaagcacaagcccaacgcatacattcccaattggtttgccttttggccttt

SEQ ID NO: 1680 - DNA, 275 bp, Gossypium hirsutum
  unsure (1)..(275): unsure at all n locations; Clone ID: LIB3493-046-P1-M1-A9
ntccgtgttaatgtcntttagtcgcttttttatgatacgattgagaggagattcttcgagtagcgcacagaaagcacccggctgctcgtgttgtcgatgctaatgaagagttgangatttacttaaggaagaacccgtcattgagttcagcggcgaggaagcctttggtcggtacctggacctgcaccaattgttcaatcagtacattaattctaaatttggagcctaaattgaatactcggcttacctccatggcttttcaccgccctacaata

SEQ ID NO: 1681 - DNA, 99 bp, Gossypium hirsutum
  Clone ID: LIB3493-046-P1-M1-B1
ctttgccgtagtggcggcggacacatcggcggttcacagcatcctcgtccacaaagccggcgaagacaagatcatggtcctcgattctcacaaactcat

SEQ ID NO: 1682 - DNA, 382 bp, Gossypium hirsutum
  unsure (1)..(382): unsure at all n locations; Clone ID: LIB3493-046-P1-M1-B10
cttcccgaaagcaatttcttctcattttcgagaacattttttttaaaggctgtggctatatattctttgaagatattaatcagaaaaatggcgctggtttctttcatcggcagggttctttttgcgtcagtgttcatcctctctgcttggcaagagttcaatgaatttggcgtcgatggtggtccagcggcgaaggagctgaggccaaagttcaacgtcttctcaaagactgtgtcgtctcacacagggttgcaagtgcctgaatttgatatcaagtatgtagttgctgctgctgtagcctttaaaggtgttgggagtattctctntacctttggcagcaccatcggagcttatcttctggttttgcaccaactcattctta

SEQ ID NO: 1683 - DNA, 98 bp, Gossypium hirsutum
  Clone ID: LIB3493-046-P1-M1-B11
attatagtgaaaaactaaacataataaagccccttcgacttgcttcattgagtagccctctcaaagcccaagaaaaatggcttctgcttccgctactc

SEQ ID NO: 1684 - DNA, 366 bp, Gossypium hirsutum
  Clone ID: LIB3493-046-P1-M1-B12
tgccgagctcatttggttagagttaagatttccatctttgtgggttttaacctcggtgttgaggttttgcttcttctgaaacagccagtcatcatcgcagaactggttaactcgctttgcagtgtaggcataacccaatcctccacaaggtttttgaattgtaaagctaatttcggagggcaagtggtacacaagtttgacagcgttggcgccttggtattatgagcaagagtttctgatgtgcgagaagaggagcaagctttttctttgccgagcttgaaagttagctccgggcgtttaatatcggaagtcgaacaaagttgttcttccagttctttgcctggtctaggagcatgctcatgcacc

SEQ ID NO: 1685 - DNA, 448 bp, Gossypium hirsutum
  Clone ID: LIB3493-046-P1-M1-B2
gccatcttctttgtcttaaatgctctcatatggggccagaagtcatctggggctgtgggagtttgggacaatgtttgctttggtcgtcatgtggtttgaatttcagttccacttgtttttgtgggtggttacattgggttcaagaagccagcaattgaggatccggtgaagacaaataaaattcccaggcaaatccctgagcaggcttggtatatgaacccaattttctccattctgattggaggaatactcccatttggagccgttttcatcgagcttttcttcattcttacctcaatctggctgaaccagttctactacatctttggtttcctcttcttggtcttcattatcctccttatcacttgtgctgaaataaccattgtgctttgctacttccagttgtgcagtgaaagatacctgtggtggtggaagtcatatctcacat

SEQ ID NO: 1686 - DNA, 68 bp, Gossypium hirsutum
  Clone ID: LIB3493-046-P1-M1-B3
ttctaatacacccactgtaaaaaaaaagagagaaatttgatcaaacggtgaaaaggggtggccttgaa

SEQ ID NO: 1687 - DNA, 346 bp, Gossypium hirsutum
  Clone ID: LIB3493-046-P1-M1-B5
atcgatagatagaaggagatggcggtgagaggtaaagcagtagaaacgctgccgagggtgatgaggagcctgaggaaggactcggcttcttcaacagtgactcgaacttccagctcttgcccctcctcttagacgccgctttctcttttctactgatcaggattaatcttcatcgactaatgttctccgatgactcagcttcgtttccaacgatatacggaaacaggattcactgtgaacggtgtcaactatgaaggcagcttgctttgtgtgggaaatttggttacttcttggggcccccgtaaattttctgaaatacttccccaaagcttatccatctttcaaa

SEQ ID NO: 1688 - DNA, 166 bp, Gossypium hirsutum
  unsure (1)..(166): unsure at all n locations; Clone ID: LIB3493-046-P1-M1-B8
agaagggcctctcttctggtgccatccagttcttagcccaccaatcttctgctggctcctcctcccttgattgcctttcctgcccatttccatcttccttctttcctctcctctttccttttgncttcttgctttatctctcccttttatcttcccattcttttct

SEQ ID NO: 1689 - DNA, 383 bp, Gossypium hirsutum
  unsure (1)..(383): unsure at all n locations; Clone ID: LIB3493-046-P1-M1-B9
cagatttgtatagcagcgtagaggctatggtaaaagaagccattggaaaagaggcggtgcaagacccttcaggcgcatttaatttgtgttatggggctacactaacatcaatgttccagaaatggtgttccatttcagtggtgctgacgttcggttgcaacctgtcaacacatttatggttaatggggacttggtttgtatggtgatagttccaaacagtgttaaccccttttctgtctttggaaactacgcacanataaattttcaggtggagtatgatcttcanaagagggttgtctcttttgcgccaacagattgtacccaaatatagatttgttgctttattaattatatataaataaaggtggttgatcatacagttt

SEQ ID NO: 1690 - DNA, 328 bp, Gossypium hirsutum
  unsure (1)..(328): unsure at all n locations; Clone ID: LIB3493-046-P1-M1-C1
cggacgcgtgggcggaaagcacgttgtgtttggacaagttgttgaaggcatgggtgtggtgaaagccattgagaaagttgggtctagcagtggaagaacttcaagcccgttgttgttgctgactgcggacagctctcttagagaagaaaaagagaactatgtgttaagttgggatgttgtctaatgtctagaatatttaatgtctgtcatttagactcttttatggtgctgtttttatcgtcactgggtttggtggttntcaggaacttgctttatgtagtttttacgattaactaccattaaataagatactctttttcgtcatcat

SEQ ID NO: 1691 - DNA, 381 bp, Gossypium hirsutum
  Clone ID: LIB3493-046-P1-M1-C10
ggaaaatggcaccttcatcttgcacaaacaccccgccgcgggttggggctcttttactcttctgcacggcattgctttgtgaatcaaggtaagcttagattactactccaaaacctgtcccagtttcaccaaaatcatgcaagacaccataaccaacaagcaaatcaccagccccacaaccgccgccggtgcactccgtctatttttccacgactgtcttcccaacggttgcgatggttccatcctcatatcttccaccgcattcaacaaagctgaacgtgatgccgacatcaacttatctctccctggagatccatttgacctcattgttcgagctaaaacagcccttgaactcgcctgtcccaacaccgtctcttgctc

SEQ ID NO: 1692 - DNA, 328 bp, Gossypium hirsutum
  Clone ID: LIB3493-046-P1-M1-C11
cttagagcttttgttaataaaataagggagcagtctcaaaaattcataacgactgatctgctatggtggaaaggtcttgctcgaatcatggaagctaaggatatatcagagagggggatgataagatccatgttcagataaaatttccggaaccaacagaaaggggactggaatttcttcagtctgagagtgataagggtttccatgtttacccagaagcagatatgctttactcaatgagaaaaccgagagcttattccagtttctccgattggggaaagggctgggctaatcctgagatccgtcgtcagcgtttagacaaaaattc

SEQ ID NO: 1693 - DNA, 443 bp, Gossypium hirsutum
  Clone ID: LIB3493-046-P1-M1-C12
gctcaatgatgcaaacatcagggaagccattgccaagaccacaggcttgtgcgtgaacagtggctcatggactggaattcctggctactgccgcttactgttgccttggaagagagtgaatttgagctagcattggcttgcttagacaaatttaaaagcataattggtaactgaattttgatatcattacctaccttctagttcatcactttcacaacaaagccataatggaaaaaaacccattccttaccataggaacattcttcataaagctgtagttacagcaagctgttaaaaagacgggtgtttaaagaaagttgttcctcctagaagttgattcttatttgctctggctattgctttatagccataatgaaaaaatcattccttaccatggaaacaatcttcataaaagctgagttacagcaaactgttaaaagaca

SEQ ID NO: 1694 - DNA, 323 bp, Gossypium hirsutum
  unsure (1)..(323): unsure at all n locations; Clone ID: LIB3493-046-P1-M1-C2
ggcaggcgcagcaaattgggtttccataaccttactgttttcagtatgtttttgggcgtcctatggtaagaggaccggaatctccaccatggctgactgaccgatngggtttcaaccaagcaacggttttccgcatgaagctgatcctgattcttcaacctctatcgatcctgatcctaccggattcggtgctggcataggtatagggttatgaaagaagctcttactgtatcgactgcgactatgtggatatcatgggcggcagcttttgcggcacctgcaattaccgatgctcttaccgcangttcaataatgggtgtggt

SEQ ID NO: 1695 - DNA, 89 bp, Gossypium hirsutum
  unsure (1)..(89): unsure at all n locations; Clone ID: LIB3493-046-P1-M1-C3
taaccctgcattttttggaagaggtatgcccatgaacggtatgggaatgatgccgggaggtggtgtanatgggcctaatatgggaatgt

SEQ ID NO: 1696 - DNA, 239 bp, Gossypium hirsutum
  Clone ID: LIB3493-046-P1-M1-C4
caagaaaggtgtcaatggcttctttacttgtcaagaattttttctatcttcttgggcaggtctgcatcttaacaccacaggcacttttcataataccagagaatgtaaaaccaaaaccgatggctgcaccaacaaggaaaaggcctaaccctttaagataatagccattttctccatattgatcgctagtattatcggggtatgtacgcctttatcacactttcggcccagctcttaat

SEQ ID NO: 1697 - DNA, 343 bp, Gossypium hirsutum
  Clone ID: LIB3493-046-P1-M1-C6
ccagtttcactatcaatggcgaagccaaggctttcgcgcgttccggcccggagggctgcatcgtcaaccatgggggtaactctgctcatcatgttcaccttctggttttaattcttttggcgctcgggatcctttcaattcccaccagtaactcccgggggggcacaaacccaacgattgagcttccattgcccataccgtagaccataatactacatcatgccgggtgggaagaacccattctaccattgaacattcttataagctgtattccagcagctgtaaaaagacggtgttaaagaagttgcccttctataagttgatattaatggtctggcttttg

SEQ ID NO: 1698 - DNA, 411 bp, Gossypium hirsutum
  Clone ID: LIB3493-046-P1-M1-C7
cgatcttcttctccttctcagaaatcttagtatcatcactatggcctcaaatgccagggtcttctttgacatgacgatcggtggtcagcccgctggtggattgtgatggagcttttcgcagattgcactcctcgcactgcggagaacttccgtgccctctgtactggcgagaaaggcgtcggccgcagcggtaagcccctccactacaaaggctcttctttccatcgtgtgatccctaactttatgtgccaaggaggtgacttcaccgccggaaacggtaccggaggtgaatccatctacggatccaagttcgctgacgagaacttcatcaagaagcacactggtcccggtattctctcaatggctaacgctggaccgggaactaacggatctcagttcttcatttgcacg

SEQ ID NO: 1699 - DNA, 393 bp, Gossypium hirsutum
  Clone ID: LIB3493-046-P1-M1-C9
cccacgcgtccggtgaaatagcatcatcatcttgtcatctccgtttatgtggacagggtgcatcacctcttacgacttattccaaggcttttaaccttcctcaagttgggcacctgtccaagaatattggctgcagctcgaacattgtgtgacattgcaactaaacccttgaggcaaaacccggatggtattacaaggtggccaaagaagccttcacaaaaggccatgaaagctcgtaagactaaatcaattgagaaaccggacgaaatatatgcaacaccctcttctttattgggatctgacaaaccggtgagatgtgacacagaccagttaatcctctcgaaaaggcctaagctctctgtagttgagaataagaaagatctcaaccacata

SEQ ID NO: 1700 - DNA, 316 bp, Gossypium hirsutum
  Clone ID: LIB3493-046-P1-M1-D10
acctggccgacctggtccacagaggggttgagacattcacaggtggaggttctatctctcactacagccaagccaaggcttcttgaacctgtttacttggtccagatctcaaccccggagcaggcacttggtggtatttacagtgttcttaaccagaagcgtggacacgtattctaggaaatgcaaagacctggcactccactttacaacatcaaggcataccttcctgtcattgagtcctttggattctctagcactttgagggcttgaacatcaggacaagctttcccacaatgtgagtttgatcactgggata

SEQ ID NO: 1701 - DNA, 441 bp, Gossypium hirsutum
  Clone ID: LIB3493-046-P1-M1-D11
aaaaaattcaacggccgaccgttggtggcgtacggagacgcttctcatctggtgtcagcagatctcaaatcttccttcgccgggtttatttgttcttcttcgttttttggctgttttcgataaattttttccatttttccatggctgctccacctgcaagagctcgagccgattacgactatctcataaagctccttttgatcggcgacagcggtgtgggtaaaagttgcctccttttgcgtttttcggatggctcatttactacaagttttatcacaaccattggaatcgactttaagattaggactatagagcttgatggaaaaaggatcaaactgcaaatttgggatactgctgggcaagagcggtttcggactattacaacagcttactaccgtggagccatgggcattttgctcgtctatgatgtgactgatgagt

SEQ ID NO: 1702 - DNA, 410 bp, Gossypium hirsutum
  Clone ID: LIB3493-046-P1-M1-D12
caatcttggccacacccttgtcacataccctcagctcgccaactgggccgagtgctcatcctggaaaaatttcactgtttcacctttcacagcctgaaccaagtcttctacttcgaaaataatccatgcgattacttccaaagcggcaaagtaaaagcaatgacactttccctctccgttttagttgccattgaaatgttcaactcccttaatgccctctctgaagatggaagtctcttgacaatgcctccatgggtcaacccttggctcctcctggccatgtctgtgtcattccgcctgcacttcttgatcctctatgggccaatccttgctcaagtattcggtatcgtacctttaagctttaactaatggctgctggttctggcccgcccattccctgtgattttgat

SEQ ID NO: 1703 - DNA, 411 bp, Gossypium hirsutum
  unsure (1)..(411): unsure at all n locations; Clone ID: LIB3493-046-P1-M1-D2
atgtgcggaagctgtccaccaaaacaatcttaatctggctgaagctttagttaggcgagttgggttcctagcgatttctcaagctggggctatgagaaaagtgctacttattttgcggaagcattagcccgaaggatttacagattttatcctcaaaacccactcgaccactctttttcagatgttcttcacatgcacttttacgagacttgcccctatctcaagttcgctcatttcaccgctaaccaagctattctcgaagcttttgagggcaaaaaaagagtccatgttatcgatttctcaatgaaccaangcatgcaatggcctgctttgatgcaagctttagcgttaagagttggtggtccgcccggctttaggttaactgggatcggaccttctagccacgacaac

SEQ ID NO: 1704 - DNA, 333 bp, Gossypium hirsutum
  unsure (1)..(333): unsure at all n locations; Clone ID: LIB3493-046-P1-M1-D3
gtgatttgaagctgcatttagttgcacaaagaaccaacatagatataataagcggcgtggccataagcaaaccacagaggaaagcttgagagagaccanaacaatgtctaaggaagtgagtgaagaaggacagggtcgtaaggactatgtggaccttcagcgggacctctgatgacatggctgactcaagcatggctttttacagagcctcatagctgagtcatagcactttctcttctcttgtactgtgctctgaatggtcacagaacacaaatcatgtatggtgtggctcttggtatgcatggctttcgtggatgatcttatcttgttact

SEQ ID NO: 1705 - DNA, 80 bp, Gossypium hirsutum
  Clone ID: LIB3493-046-P1-M1-D4
gggatttggtaacatttatgcacttggcgactgtgctactgttaaccagcggagagggatggaagatatatcggaaatat

SEQ ID NO: 1706 - DNA, 440 bp, Gossypium hirsutum
  Clone ID: LIB3493-046-P1-M1-D7
taaatccctcaaatggaacccaaataatttccatttcccacttttcgtatgccctgttcttcttcttcatcttcaaacccacaaattttttttccaaaaatcttatatagtgatagtgcaggcgatgaatctttggtcggacgataacacgtcggttatggaatcttttatgagctcagacatatctgctttatggccaccaccaccacctccgccgccgccgcagcaatctcagccgtccgttcctctcaaccaagactcgctccaacaacgtctccaagctctcctcgaaggtgttcgtaattgttggacttacgctattttttggcaatcctcatacgattacgccggcgccgccgtgctcggctggggagactggtattacaaaggggaagaagataaagagaaagcaaagtcaaaagcttctttatctacaatcg

SEQ ID NO: 1707 - DNA, 435 bp, Gossypium hirsutum
  Clone ID: LIB3493-046-P1-M1-D8
aaagtatgcgagcagtgttcgaagaatggttcatccatcacaaagttgatgtgagctttgctggtcatgtccatgcttatgaaagatcctatcgaatctcaaatataaggtacaatgtatcaagtggtgaacgtttccctgtaccggactaatcagctcctgtttacatcactgttggagatggtggaaatcaagaaggtttagcaggaaagtttagagatccccaaccggattattcagcattccgggaagccagttactgccattcgacactggagatcatgaacagaacacatgcagtctatcactggaaccgaaatgatgatgggaaaaaagtggcaattgactcatttgtattgaacaatcagtactggtcaagtaacgttctagaaaggaaactgaagaggcattatttgaatgggatgaggatgattg

SEQ ID NO: 1708 - DNA, 305 bp, Gossypium hirsutum
  unsure (1)..(305): unsure at all n locations; Clone ID: LIB3493-046-P1-M1-D9
agtttgggtaccctatttttagctagcttattagtctgtaaaatattactgtcgagagaagcttgtttttcgtgtttttttggggtttcttattgatctcttattggataaataaagaagagaagtagtagcaaagatgatgcagctcagtgttgagagggttcctactgttgtttcgaattatcaaaaggatgaggcggaagagactgctcgccggaacggtggatgtgggaagaattgcctttaaaacttgtgcactctagagcaaagcttnctttattgctttcagaagagagtgaaaaaga

SEQ ID NO: 1709 - DNA, 159 bp, Gossypium hirsutum
  unsure (1)..(159): unsure at all n locations; Clone ID: LIB3493-046-P1-M1-E1
accaactgcagttgccattgcttatggtttggacaaaaagggtggtaagaaaaggatggttgtctttgaccttggtgggggaacatttgatgtantatctgacaattgacaatggtgtatccaaggttttttccacaaatggagacactcatttggggg

SEQ ID NO: 1710 - DNA, 419 bp, Gossypium hirsutum
  Clone ID: LIB3493-046-P1-M1-E10
cacagattttggggaaattaattaaaatgaattttattttttaatttaccaaagagaggaacggaaacttctacttctcacccttctttttctcgatcaaacaccgacagtgtggccagaaaaagtcttttgctcgattcgattctatctgtatctcgccgatctttcatcaatggcttcttgctcaggaacattggttgagagatactgaccgggaaccttgtcagttatcagaacatatgaagtgctcactctgtttgagacgttgtcttgaagttgtttcacttgcactcttactaaacaaacttcgccgaggattaattgaggtgggtgaagggagactgaattctgagactaaaactgtttggttgctatcacattcgacctgtgtgctggaaaatagagaacaaagactacta

SEQ ID NO: 1711 - DNA, 436 bp, Gossypium hirsutum
  Clone ID: LIB3493-046-P1-M1-E12
ctccagtgagacttgtcgagtaaaagaacaatcccggaagatatggctcaggtgggtcctcctctcttttgcacactgggcacaacgtgttattcaccagtttgcggattctcaaattatacaaaaccgacacataatccttggccactctccacaagtggactccaatcttacttggcaccttaatgacccaaagtcttttgtagaacttagctagaggattttgttgtatattggaaacttctattgtattgctccatttgtatctattttttgctgtatatacccctgtattatcccccctccaaactaaggcatcttgtgactcgctgttcgccagtggaattgcgataattatctgtgtttggtcttcctcaaataaagatcggatttcctcttgtttccagctccccggatccatgcatcgttccatata

SEQ ID NO: 1712 - DNA, 276 bp, Gossypium hirsutum
  Clone ID: LIB3493-046-P1-M1-E2
gctacttttgtcactgaaaatccttccactgccaatgaccacaaccaaaacccggttgggaatcatggaggcacggagtcgaaccctgaaactaatcagaagaagaagaactagacggagaacaagttaggcccgtattgcaagtaagtgctcctactgggaaattttggcataattggaataagctgaagagcatgctatcttttaagttgaacttggtttaatcaaagtatcctgaggcaaaaatgacggttgaacaacaaaatgcttcactag

SEQ ID NO: 1713 - DNA, 329 bp, Gossypium hirsutum
  unsure (1)..(329): unsure at all n locations; Clone ID: LIB3493-046-P1-M1-E3
tttcaacctcgcagttcgcacgctctcatcattttcctccgggaccgtcagtctgccgaaacaccttctttccgagaaaaaaaaaacctcaagaaagaaactcatggctgatcaacttacggacgatcaaatctctgagttcaaggaggctttcancctctttgacaaggatggcaatggttgcataactaccaaggagctggggacttgtatgcggtcacttggtcagaaccctactgaggcagaactccaagatatgatcaatgaagttgatgctgatggaaatgggaccattgattttcctgaattccttaacctaatggcaagga

SEQ ID NO: 1714 - DNA, 355 bp, Gossypium hirsutum
  Clone ID: LIB3493-046-P1-M1-E4
acgtagtgaatttgcaaccgaaaaccgaatcaagatcttcgcaatctcatccaggtgcaaaaaagaaaaatggatctcagaatcatgggtttcgatctccgctctttgaatactctccaacacatgatggatctttttgacgatacggagaagatcccgaacgcaccatcaaatgtttacatgcgggatgccaaagccatggctgcaacaccagcggacattaaggagtaccccaagtcttacgtgttcatcgtcgacatgccggggctgaaatcaggggacatcaaggtccaagtggaggacgacaatatgctcttgatcagcggaaaaaggaaactagaggaagagaaagaag

SEQ ID NO: 1715 - DNA, 366 bp, Gossypium hirsutum
  Clone ID: LIB3493-046-P1-M1-E5
aaaaaaaaaagtatttcctttttcttcgtccaaaaaaaatttcctaaaaaaatgaagtgcttttctaataacccaggtccaataaatcatcgcccccccccttctattctacttaacttttaatttcttaaaaaattctcttttcttttttccaacttgaaaatgcaacttgatggtcccaaaacttttgccttggttcacttaataaatggtattccgtagtttctcagtcaagtttgctccttttggttattatccctttagtcactaaagaggttaaagcctttttgttcttttaaaggagcttttataaagattttaaaaactgggttttgatctctggagttgatagttaataattttgat

SEQ ID NO: 1716 - DNA, 413 bp, Gossypium hirsutum
  Clone ID: LIB3493-046-P1-M1-E6
gtgatatccagaaccgcctttggtagcagttacttggaaggggagaaagattttgagcggtgctgatgaagatgtcagtaatttcaagccgaaatattttaaagcaaagattcccatcatcagcaagtttttgaaatcttcttatgaaaatgaatcaaaaagaagtgcccaaatgatacactattctttgatgaggattgttaaaaaaaagggagagagagtagtgaactgagaaactgataacttccgtcctgattttcttggattactcgtagatgcttatcatgaggcggaccacgaaaacacgctttcgattcaagatatggtagatgagtgtaaaactttttattttgcttggcaagaaacaatcaatttcttgcttgcatgggcaactcttcttttagcaatacaca

SEQ ID NO: 1717 - DNA, 431 bp, Gossypium hirsutum
  Clone ID: LIB3493-046-P1-M1-F10
ggagaaaccatcaccttcttgcttctcaatacttgactcattcacggttgagtgtccttcaatatttttaggttcgggcatgaagacgacagctctgtattcttgacaatggcctcctccatgcctaattttccttcattgttgtgaagactcagaaggtgaactccagcttctttattcatcgtatttcttgagtctcacaatttcaacgctcggaacttccctggcttcaaatacttgatccattttttcaaaaatctcccaatctttgcatggatcaggcccaacaaactttggagtcatgccatcgagtagaaaatcctcttcaggattctcagcaagcccgagatattgattgttggcactaagtgcaacagtatcctcacgcttgttcgaaccaaccttacagggaaccttggccacctttgatg

SEQ ID NO: 1718 - DNA, 406 bp, Gossypium hirsutum
  Clone ID: LIB3493-046-P1-M1-F11
cggacgcgtgggttttatttctcacttaacccgtttgcctccggcatcttgctgcatggcttcagagaaagagagctgcccttgctgctgctccctctgattctcctaccatatttgacaaaatcatcaacaaggaaatcccactaccgtggtgtatgaggatgataaggtctaacttttcagggacatagctccccagcttcctacgcacattttaataattccaaaatcaaaggatggcctaacgggtttgtctaaggctgaggagaggcactgtgaaatccttggctgccttctttatactgcaaagcttgttgcaaaacaggaagggctggaagatggattcaggattgtgatcaatgatggccctaaaggatgtcaatctgtgtatcacattcatgtccac

SEQ ID NO: 1719 - DNA, 429 bp, Gossypium hirsutum
  Clone ID: LIB3493-046-P1-M1-F12
ttccaagaaaggacaacaggaagaaaaaaaaaaaagagagagagaaaaaatggtggttcctttagtcccttccatatttcttcattttattttcatcttcttcgtgggttgtccacggcagcaagaacgattccatttacgagatactaaagcttcatgggcttcccacggggctgcttcccaaggggataacccgatttgaatactacgatacgggccggttcgaggttcacttggatcaggcctgtaatgccaagtttgaaagcgagtttcattatgacattaacgtgtcggggactttgagttactggaagatcatggaattgtcagggattttggctcaagatttgttcctttggttcccggttaaagggatttgggtcgatgtccccagctcgggtcttatttattttgacatccttttcgttt

SEQ ID NO: 1720 - DNA, 355 bp, Gossypium hirsutum
  Clone ID: LIB3493-046-P1-M1-F2
cggcgtcctatggtaagaggaccggaatctccaccatggctgacggacccaatggttgggaaccaaccaacgggtttccgcatgaagctgatcctgattctcaacctctatcgatcctgatcctaccggattcggtgctggcataggtataggttatgaaggaagcccttactgtatcgactgcgacgatgtggatatcatgggcggcagcttttgcggcacctgcaattacggatgcccttaccgcaggttcaataatgggtgtggtggtggggtgtcgcttatatggatgaactcaaactaacgattaaggaccttaccatgaaacttgatgccaatggtcttttagggaaaa

SEQ ID NO: 1721 - DNA, 88 bp, Gossypium hirsutum
  Clone ID: LIB3493-046-P1-M1-F3
gtccttgttgagaagaggtactagggttacttatcatccttactccatgggacgggtggaaaagatatggggtccagattgcttggag

SEQ ID NO: 1722 - DNA, 361 bp, Gossypium hirsutum
  Clone ID: LIB3493-046-P1-M1-F5
cttatcacccttagccaccaccacaaccgccgtcagttcctccgttgctgtgtgcgtggctcttgggttgtttttgtgtttccttttgttgaagctttaaaaaaatggtgacagtgggggaagttcgtaaggcacaacgcgccgaagggccggcaccgtgtggggatcggacgtcactccaccgaatgtgtggatagagcacgtacctgatactatttcgtatacaaatgtgagccagactgactgaagagaaattaagccatgtcgaaaataatgatcaaagcgtacatgttctacagaaagatttgaagagaacccatgtatggaatcatggaccatactagatgcaagacagaatggt

SEQ ID NO: 1723 - DNA, 459 bp, Gossypium hirsutum
  Clone ID: LIB3493-046-P1-M1-F6
tttgcccgaaggtgcatcgtgcaggtctcttatgctattggtgtgcctgagcccttgggtgtctttgtagacagctatggaactggaaagattcctgcaaagaaatcctccaaattgtgaaggagaacttcaacttcaggcccggtatgatcaccatcaaggtggatctcaagatgggtggcaatggccggattttgaagacagatgcctacggacactttggaagggactacccggacttcacctgggaagttgtgaagcccctcaagtgggagaagcctcagtcttaaaatccagctttggctgtcctcgaatgtctctaatctcatacatatgatgccccccattcattttcattttcattttcttatttggactctttcacctttaattgtgtcctgtcaatgttctgttgcaaaaatgtatgagaattttgcttatattgatgccacttgaagt

SEQ ID NO: 1724 - DNA, 444 bp, Gossypium hirsutum
  Clone ID: LIB3493-046-P1-M1-F7
tagattttactctttttgctatgtcttcaacaaatgaatatggttcaatagtagtgcaactcctcttgggtaaattttcgctttcccattatcgtctcagacatgtttgtgtcgaatatatctctattgactaagcgacgccaacttctttttttgtgacccaattgttgggcccctattaaattggtaaacccctccagctcagagtttcattcacattgattcttgttagacttatcttccacgtctataggcgtaatttgaaaagataaattagctttgatatccctataattttgcctcattttcacaatttccaagaaagtagaattcttctctgagtaaccttcatttgctgtctgatgtatttgtttcatagaatctggtgaaaaacttcatctctactcggtgcttcacacttgtgtataacattgttcaatgtct

SEQ ID NO: 1725 - DNA, 328 bp, Gossypium hirsutum
  unsure (1)..(328): unsure at all n locations; Clone ID: LIB3493-046-P1-M1-F8
cccacgcgtccgggtccgcccaatggccatcgctccatcctcctccaggcgtgtgaacaccaatgccatgcgtgagttcgacgactatggtgatagcgtgacctcagtgatgaacgccagcgttcactttctcgccgcggtgacggtttcttcacaggtgaggtgttcgatccttttgctccaacaaggagcctgagccaagtcctgaacatgatggatcagttcatggagagcccatttctctccgcttcccgtggcatggggggtggtctncgcctaagctgggacgctaaggaaacggaggatgccttgaaccttangattgata

SEQ ID NO: 1726 - DNA, 148 bp, Gossypium hirsutum
  Clone ID: LIB3493-046-P1-M1-F9
gctttctggaaatataattgatatctgccctgttggagctcttacctctaggcggtttgcatttaaggcccgaaactgggagttgaaaggaacaggactcattgatgtgaactgatgctagttggatccaacattctgaattgatagc

SEQ ID NO: 1727 - DNA, 266 bp, Gossypium hirsutum
  Clone ID: LIB3493-046-P1-M1-G1
gaaggcttcgattatgagctttacaataggaacgacatcaacaggattttggggcgtagggcttcttgaatctctttcaaggattctgcttgtaggtgctttgggtactatggtttccaagaaagaaatacatcttatactcattgatgatgacttgttttgtgtggtagaagatctcatctggcaatagactatcaatgcatttggaacagcacaatacaggaacttacttgagtcccatccacttccaatttttcttttaacac

SEQ ID NO: 1728 - DNA, 429 bp, Gossypium hirsutum
  Clone ID: LIB3493-046-P1-M1-G10
gaccaaaccacggaacaaggggattgttcaaaatacaaaggaaacgtccctcgtggctgtaaaaaggatccgacagttgtggatttattgcctggactccttataaccagcagattgcaaattgctgcaaagggggggtattaaattcatgggttcaagagccggccaatgcagcaagctcatttcaggttagtgtgggcgctgcaagaaccactaactaaactgtgagagtgcctagaaactttaccctggaagcaccaggtccaggatatacttgtgggcctgccaagattgtgaaacccactaaattcataacggctgataaaaggagaataacttaagctatgatgacatggaatgttacatgcacatattcccaattcctggctcaaaagactcctacatgttgcgtctcgctctctttctttt

SEQ ID NO: 1729 - DNA, 106 bp, Gossypium hirsutum
  Clone ID: LIB3493-046-P1-M1-G11
gcaaaaatgaatgagaattttgcttatattgatggcactggaattaacagagcgtggacattatgtagttagttgttacttggggataaatccaaatattgttctt

SEQ ID NO: 1730 - DNA, 237 bp, Gossypium hirsutum
  Clone ID: LIB3493-046-P1-M1-G12
ctccttgcatcaagtcactctaaatccttcccattttcttctcaaacttggtctgcttcacaaggcagtaatggcgatttcctttgggatttatcttctttttctactgaatttcttctcatttggggcgatattttcttcagcaacaagctttacactcggaaatcgttgtagttttacattatggcctggttccctgaccgaaaatggccctccccttggtgatggtggttttgc

SEQ ID NO: 1731 - DNA, 253 bp, Gossypium hirsutum
  Clone ID: LIB3493-046-P1-M1-G4
gtaggacccaagcactacaacttattgattttagagaaccagaaatgtttgatgtgtggtgcttagaaaatttggagcatctagaggcactacaattccttgatttgtggaattatgcgagataaaaatggacaaagttgtctacatggggtgtcttcaagtaagtggtgcttcatgctttcactcattgagcacagctcagattttacactgataagaaattgacagacatgacctggctgattcttgctcc

SEQ ID NO: 1732 - DNA, 96 bp, Gossypium hirsutum
  unsure (1)..(96): unsure at all n locations; Clone ID: LIB3493-046-P1-M1-G5
gttaactatctccggtggccatgtgaatcctcccgttacattcggtgctttcgtgggcnggaactattactcttgtacgtggtatcctttattgga

SEQ ID NO: 1733 - DNA, 372 bp, Gossypium hirsutum
  unsure (1)..(372): unsure at all n locations; Clone ID: LIB3493-046-P1-M1-G6
cgcttccttcgacttgctttctcgccttttgcttcaaaccctacttctcttcttgatggtcaaaatgaagctcgtcaggtttttgatgaagttgaacatgaaacggtgtccattgagctcaagaacggaaccgtcgttcacggaaccatcacaggcgtggatagcagcatgaacacccatctgaaaacagtgaaacttacatagaaggggaaaaatccagtgagtttggatcacctcagtgtgaggggtaacaatattcgctattatatnctgcctgacagcttaaatcttgagacattgctggttgaagagacaccaaaagtgaagcctcaaaaagcaacagcttggaggcctttgtgacctggtccgagt

SEQ ID NO: 1734 - DNA, 172 bp, Gossypium hirsutum
  unsure (1)..(172): unsure at all n locations; Clone ID: LIB3493-046-P1-M1-G7
aaatgacccgtcttgcgagagagttttttgctttgcctgctgaagagaagcgtcggttctatatgtctggtggcaagaaaggtgntttcatcntctccagccacctttcannggagaaagctagtgcaagaattggctgagagattgctcacatacttcttcatgggggggg

SEQ ID NO: 1735 - DNA, 265 bp, Gossypium hirsutum
  Clone ID: LIB3493-046-P1-M1-G8
tccctccctttcccctcattctagtaagttccctaaccccaaccctaatcggttgctccgttctcactcatgtttcactcccctcactctccgttctaataaaaccgcgttactcgtttcaagaaagctcctcctcctcaaatgcctctcaatttcctcgttggccgcttcggcgaaggcatattttttttaaggtaatcatatctaaaaactacgacttttgctaaaggtacacaatgtgagctcatcacccaaaaatatggtt

SEQ ID NO: 1736 - DNA, 149 bp, Gossypium hirsutum
  Clone ID: LIB3493-046-P1-M1-G9
cctttttctactatacatgttcttttacaccttgggttaaggcttttatatggtatatagttattttaagagtatataagacaataatttacacttatttgtttttcaaatcaactcttttgtcatgaaacttttgtttttgaaaataa

SEQ ID NO: 1737 - DNA, 68 bp, Gossypium hirsutum
  Clone ID: LIB3493-046-P1-M1-H1
caaaaagatccagaaacaatgtatgccattcttgaggttcaaaaggataagggggtaaaatggtgtcc

SEQ ID NO: 1738 - DNA, 323 bp, Gossypium hirsutum
  Clone ID: LIB3493-046-P1-M1-H10
gcagcttgcaatcacaatggccgtgcaatgctggtgatccctgagggaaatttcttattacgatcgatgttattgtccggaccttgcacttttaacctccgttgatggttcaattcaacggaaaccttttgccgcaaggttcaacgtccactgccgaaaatgcagactggatcacattcataaactttaatggcttgttcataagtggaaaaggtaccatcaatggcctaggcgagaaagaggcatggaaggctgtatgcgatggttgccgtcgaaaggcttgtaatttgaagttaatcaagttgaacgacgtgctcattagt

SEQ ID NO: 1739 - DNA, 395 bp, Gossypium hirsutum
  unsure (1)..(395): unsure at all n locations; Clone ID: LIB3493-046-P1-M1-H11
aaagattgcagtatgttgcgttttcaacatatttaggattggttctatgccttctatggaatatcatagctgttactacagcatggatcaaaggagaagggtgttaggatctggttcttggctatcatcnttcttcctagcaggggtaccaggagcctatgtattgtggtatcgtccactgtatcgtgcttttaggaatgagagtgctttgaggtttggatgggtcttcctgttttatttgcttcacattgccttttgcatctttgctgcggtggcaccccctataggttttagagggaaatcacttaccgggatcctacctgcaggtgatcttgttggtggcaatgctttggttgggaacttctacttcattggtttcggactattctgtcttg

SEQ ID NO: 1740 - DNA, 423 bp, Gossypium hirsutum
  unsure (1)..(423): unsure at all n locations; Clone ID: LIB3493-046-P1-M1-H12
cgtaccggaatgcaatttccgacccgacctacgcgttcgattgaagtttcctttctcgattttctatttagccaaacaagatgcagatcttcgttaagactctaaccggcaagacgatcactctcgaggtcgagagctccgacacgatcgacaacgtgaaggccaaaatccaagataaggaaggcatccctccagaccagcagcgtctgatcttcgccggaaaacagctcgaagactgccggaccttggccgattacaacatccaaaaggagtcaactcttcacctcgtnctccgtctgcgcggggggatgcaaatcttcgtgaaaaccttgactggcaagacaatcactctcgaggtcgagagctccgacacgatcgacaacgttaaagcgaagatccaagacaaggaaggcatncccccag

SEQ ID NO: 1741 - DNA, 337 bp, Gossypium hirsutum
  Clone ID: LIB3493-046-P1-M1-H3
attcaacatattatcagggacttcaatgtcatgccttcatgtaagtggaattgtggctttgatcaaggccagacaccaaaattgaagtgccgaaccagtaattttgttttaatgacaaccgttaatgttaatgataccatccataatccattccaggacttttccactgcagcagtttcaattccctatgatcatggacttggtcttataaaccttttgaaggctctagacccaggtttgatctatgacatttcagcccaggagtacttttgtattcctctgcacacagaaattgactgcaatgcagctaaaagcttttagcaagcattccaatatg

SEQ ID NO: 1742 - DNA, 81 bp, Gossypium hirsutum
  Clone ID: LIB3493-046-P1-M1-H4
gaactaatgagggcttaatcatagatatattgggtcacagaaatgcggagcaacgaagcttgtttcgaaaaactacgctga

SEQ ID NO: 1743 - DNA, 410 bp, Gossypium hirsutum
  unsure (1)..(410): unsure at all n locations; Clone ID: LIB3493-046-P1-M1-H5
gctggtgtgactggtaggcccaatgttgattgngtgtgaagtctcacacaaacatgaagcaggttcggaccaatgtggctggaaccttgaccttagcagatgttgcagagaacatgggcttttgatgatgaattttgctacagggtgtatattcgagtacgatgcaggacatcctgagggctccggcattgggtataaagaggaagacacacccaatttcactggttccttctattcaaaaaccaangctatggttgaagagcttgtgaaagaatatgacaacgtctgcactctcagagttcgaatgccgatctcatctgacctaaacaaccctcgtaactttattaccaagagtgcacgctacaacaaggtggtcaacattcccaacagcatgacaatcttggatgaac

SEQ ID NO: 1744 - DNA, 202 bp, Gossypium hirsutum
  Clone ID: LIB3493-046-P1-M1-H6
gttgaggtgtgtatagtgatgggatcgtttgatgtatggttcatgacgcgattattgcgaacatggtctgattctgtgtctaaacaaatattgtcgtcgcacttccgcttattacggacagtgtctaggctttgcatgtatgagcgaagcacaaattcattttggtttgagatcgactcgtttacgtattactactgttttt

SEQ ID NO: 1745 - DNA, 110 bp, Gossypium hirsutum
  unsure (1)..(110): unsure at all n locations; Clone ID: LIB3493-046-P1-M1-H7
aattctttcccgccccggtgccaatattttgcttcctagaccgngcttcccgctctatgaagctntgtgtgcttataaccatctttgaatgcgtcattatgatcttcttc

SEQ ID NO: 1746 - DNA, 469 bp, Gossypium hirsutum
  unsure (1)..(469): unsure at all n locations; Clone ID: LIB3493-046-P1-M1-H8
ggagggcgagagtagtggaaataggaaggaaaaatgagcttaaaacatcaccatagctccaactccacagcagctgctcaatctctctcttttgatgacattgccgacttcttctctcttccccttgacgacgccgcttccactcttggcgtttgcacctctgttctcaagaaaatctgccgtgaaaatggtctcgacagatggcctcaccgcaagtttttagctggaaagagcgtcgaagaaatcaagaggcatgcagctagagaaagaagaagggaaatcgctgagctttcaaaggctcatcggcagagctctcaacctcaaccacaaaacaatgaacaacccaaattacaaggtggctcagcattaccgaacttacaacagcaagggataagaaacatacaaacagctcangccctgaaatttagccatcaaagcttgatgactggagctgcaatgtcagatgaat

SEQ ID NO: 1747 - DNA, 248 bp, Gossypium hirsutum
  Clone ID: LIB3493-047-P1-M1-A11
aaatctcttgacctcaccgctagtgacctcatcgatcgactctctttccaggcacagcgggatatctcaaacctcaagaacattgctggagagacgggacagaaaataacgccgtggcatccactgcttattacagacttgcaacacacaatgctctgatattatattgttgagggagttctaaagcatatataaaggagttgatcgagacattaccattaccagcccatgtgtgtcatagtgagcat

SEQ ID NO: 1748 - DNA, 321 bp, Gossypium hirsutum
  Clone ID: LIB3493-047-P1-M1-A12
ctctaatctcaaaagctaatatttgaaaatttttggttattttttagaaaatgggttgcttgtttcttcttcctttgcccggtaaacggtgagttgagagacacggccgaagcagtgttttggtgatcctttaataagggatattgctagccgcgttttttctggtgatgggagatgataaatcggcggcgatgacggcgagtagagatcgtgggcttctaattccgggggctggatacggagacgatgattcctgcaaagcttcttctttttcggcttcctcttcttcgcattatggcgggcgtgagaccttttacaaaa

SEQ ID NO: 1749 - DNA, 253 bp, Gossypium hirsutum
  unsure (1)..(253): unsure at all n locations; Clone ID: LIB3493-047-P1-M1-A2
gcctgatggtgatggaggtgctgcagtgcagctttatgccaaggaatgtagcaagcggtggttggaggttcttaaaagagggcctgaggaaaaggagaaggaattggcatctcaaacatgcttccgctgaaaccttctttgacatatctaaaggccaacgggcttttatcaaggcagaggaggctgagaatcttctaaggcctntgaaagaaccgggaaattcatacaccaagatatgctttagtaatagaag

SEQ ID NO: 1750 - DNA, 316 bp, Gossypium hirsutum
  Clone ID: LIB3493-047-P1-M1-A3
gtttgaaactctggaagacacttcctttgattttgagagaaaagagtaaatcttgggttgtctccttcattcgattccgcttaattataacccgcatttctctcagacgtgaaaaatagtctgtctttcacaaagctatttagccatcttttcgccaacaaggagatgcgtatactcatggttgtgctagatgctgcgggtaaaactaccattctttacaagcttaacttgggagagattgtcactaccattcccaccatctatttcaatgttgagaccgttgaatacaagaacatcagctttactgtttgggatg

SEQ ID NO: 1751 - DNA, 254 bp, Gossypium hirsutum
  Clone ID: LIB3493-047-P1-M1-A4
gccaaacgtgttagaagtcatcatatcacttggaagacaacatagatacatgtgggtggggcttttcattaattccacactcgcatattcagctaacttatcgaacttcttgggactaacatacaagtgcattgacactccaggtattaggcaatgcaaaaggtgcagtggctgttgttatctcaatacttttgtttagaaatcccgtcacagctgttggcattggcggatatacgatgaccatacttggcgtc

SEQ ID NO: 1752 - DNA, 476 bp, Gossypium hirsutum
  Clone ID: LIB3493-047-P1-M1-A5
ggaggagaagattggcaacattgaaacccttttaataggatcactagcaggggctatgtcaagtagtgcaacattcccacttgaggtggctcgcaagcaaatgcaagtaggggcgctgacggaagacaggtgtacaagaacgtgttccatgcactgtcgagcattctgaagcaagaagggattcatgggttatataaaggtttgggtccaagttgcatgaaattggtacctgctgctggtatttcattcatgtgctatgaagcatgccaaaggatactggtagacaaagatgaggaaatgtagaatttgtggagctggcataagttttaggttttctttcaattttttgatatattgaaccggctaaattttgttgcttgagggcctactcttgagtttgggtagcggcatctttaagtgcaaggtaagtaggtaagaaatgaggttggcaatccataaggggtttcctttggact

SEQ ID NO: 1753 - DNA, 252 bp, Gossypium hirsutum
  unsure (1)..(252): unsure at all n locations; Clone ID: LIB3493-047-P1-M1-A6
gggaagagagccagcagttcttgggatgaaccctaaacaccttccaccgtagtacggggactgtttacctgatcaaacacaagccatggctacaaagagattgtaatctgttaatgaagatttagatagcttanaatttagatagtttaagcagagccctctcttcggccttggctctactctccggcacttganatccagacaaaaacaaagtccaagttgaaaaaggaaaatcccacaaagataaccaaa

SEQ ID NO: 1754 - DNA, 298 bp, Gossypium hirsutum
  Clone ID: LIB3493-047-P1-M1-A7
tgtagatcgtttgaagcaccagatctaggagaatcttatcaaaattgatccgagggagtgtgcctaaatagtaaagggtcgtacgggcgtgtagggtgaaggtaatccacgagctagatgttggactcagtgaatcggaggtctcgagagatacaataatttcttggtttggttttataagtttttcttaaattcaataaattattttcaatagatttgtaagtaaactgtggaatgatctttgattttggactttttgaaaaattatggattttttcgtttgaactataattgtgat

SEQ ID NO: 1755 - DNA, 312 bp, Gossypium hirsutum
  unsure (1)..(312): unsure at all n locations; Clone ID: LIB3493-047-P1-M1-A8
gaaatcttggaaatgacgagcaaatttatgactgatcctataaggatccttgtgagagcgtgatgagttgactctagagggaatcaagcagttttttgtagcagttgaaagagaggagtggaagtttgataccgcttatgtgatctttatgatacanttgacaatcactccaagctgtcattttctgcaacacaaaacgaaaggttgattggctaactgagaagatgcgtagcaataactttacggtatcgtcaatgcatggggatatgcctcagaaggaaagagaggcaattatggcagagtttcgggatg

SEQ ID NO: 1756 - DNA, 121 bp, Gossypium hirsutum
  Clone ID: LIB3493-047-P1-M1-A9
gaagtgtccctgacgccgtccgaattcggtcaccacgcgtctgctctaagttcctttcactctaactataataatactaaacaaggttcgaccgactagggacacacgactaatgtatcac

SEQ ID NO: 1757 - DNA, 365 bp, Gossypium hirsutum
  Clone ID: LIB3493-047-P1-M1-B1
ttcttcttttctaaaccctaaatcccctttgaaaatgccgattctcctttccctggcggcggccaacagatttagactggagagaacaccttttctcctttcaatctcctcttaactcgattttaactaagcaagaggagatctacggcgtgctttcaaggtaaactcccgcttttcccttttttattcatgccttcgagtaaaaataaaaaataaacaaaagatcaagccgaaaaaaaagaacgcccccgagatttcagtcagaaaatcacctttaagaatcgggtggtttctattgcttctggttttttatgtggatttttggggttatgtggcgttcgagtgtgtaatatgcatgtgtatat

SEQ ID NO: 1758 - DNA, 375 bp, Gossypium hirsutum
  Clone ID: LIB3493-047-P1-M1-B10
atcctccgtcaagtgtggaaagcgccagcgatccattgaaaataattgattcgggcgagtttccctttggtgctaggccacaaaggaaggttgagggcattcaagcaagaccatagaagtttcaaccacaaaaccaatctagaggaaagaagtctcagttacactccttatgcaagatcttatcatgtccttcaactactaccagaagccgtgtaagacaacctggaaaccttaaccgctctgagctgcatgttgcacctaaaaaatattcagacatcttatctttgcatattcccgattgttatttggaatcatacccagatactaaaaggcatggaaccttattgtaggaacttgaatgattgcacttaccag

SEQ ID NO: 1759 - DNA, 429 bp, Gossypium hirsutum
  Clone ID: LIB3493-047-P1-M1-B11
ttttgctgcagccttgagtctgttacccggatcgccttcttctgtatccgtgaggggtccgtcacctttcacacctcccatgtctccatctgctaatggcatgtctcattctaatgttgcctggccacagcccaatgttccggccctgcatcttcctggaagcaatcttcaatctagtcgcctcagatcttctcttaatgcaagagacattccaactgaagacttcaacttgctgccagattttgatgtgcagcaacaacagctgataaatgagttatctagcctctctcagccctctatgagttctaattctttaaatcgatctggtcgattgaagactctgactccatcgaatcttgatgatctattttctgctgagaactcatctctgcagtactccgatcaagcattggctgcggcagtttactc

SEQ ID NO: 1760 - DNA, 309 bp, Gossypium hirsutum
  Clone ID: LIB3493-047-P1-M1-B12
catggtttccaagaagaaatacatctataccattgatgatgactgctttgttgcgtggagatccatctggcaaagacatcaatgcattggaacagcacatacagaacctactgagtcatccactccatttttctttaacactctttatgacccataccgatccggtgctgacttcgttcgtggctaccctttcagtctccgtgagggtgttcccactgccggctcacacggtctctggctcaacatcccggattatgatgctcccacacagcttgtcaagccactcgagaggaacaccaggtatgtcga

SEQ ID NO: 1761 - DNA, 435 bp, Gossypium hirsutum
  unsure (1)..(435): unsure at all n locations; Clone ID: LIB3493-047-P1-M1-B2
cggacgcgtgggcgatacatgtaccttacagaagagattttgaaagagaatcccaaggggtgtgaatacatggctccttcactggatgctaggcaagatatggtggtagttgaaggcaaagctaggcaaagaagcagccaccaaggccattaaggagtggggccagcccaagaccaagatcacccaccttgtcttttgcaccactagtggtgtggacatgcctggggctgactaccagctcaccaagcttttgggcctccgcccctccgttaagcgcctcatgatgtaccaacaaggttgcttcgcaggggggacggtgctccgagtggctaaggacttatctgagaacaacaaaggtgctcgtgtacttgatgagtgctcggagattactgctgttaccttnccgggacctagtgacactcacctaaacagtct

SEQ ID NO: 1762 - DNA, 324 bp, Gossypium hirsutum
  Clone ID: LIB3493-047-P1-M1-B3
cacggttgcctgcattacggagctgtgctcatggctttaccggacgagtgtcttcggggttgtgtgtgttcttttccaccttatttgcaatctccaggttctccgactcccgacttgtcaggttttccaaattgattctgatgttggttcagaattgtgcgaacaccttctgatcaggaggcatttcctgatcatcatccatcgatatctcccgtttataatatgttgcctgatcttgatcactggcaagcaaatcacttctttggttattactaccaaagctacttctgcacttaatttttttaaagctggacaacttgcttt

SEQ ID NO: 1763 - DNA, 450 bp, Gossypium hirsutum
  Clone ID: LIB3493-047-P1-M1-B4
cggacgcgtggggttctataggaatcctagcgccgatatgctgttgaagccggaggagtggaaccttgatcttatcagatcttccaaggtatttcactatggatcaataagttgatcgggagccatgcagatcagctcatttaaaggcaatggaagtagccaaaggagctggtgcattgctctcatatgatccaaaccttcgcttgccactttggccttcagctgatgaggctaggaaacagattttgtccatttgggataaggcagatattgtcaaggttagtgatgtcgagctcgagttcctcaccggtagcaacaaagtcgacgacgaaactgccatgaaactttggcgacctaactttacactgctcttggtcacccttggtgaaaagggtagccgatactacaccaagaatttccgtggggcagtcgatgctttccatgtcaata

SEQ ID NO: 1764 - DNA, 269 bp, Gossypium hirsutum
  Clone ID: LIB3493-047-P1-M1-B5
gctacccctcatgctacctgcgttatctaccacgccgaaatagaaacttctcgatggagagaagcccggtatcatgatttgctccacaatagatccaatttccttgaaaggcggagaaaataccgatctcagcgttcgacgctcttcaacggctatgaagccgttttgagaacttttcacggcatgaaagatcctgcattttatctggccaacatacaaatggtcgatgcacatgtcgcgtaaataatcgagattctagttcaaatgat

SEQ ID NO: 1765 - DNA, 310 bp, Gossypium hirsutum
  unsure (1)..(310): unsure at all n locations; Clone ID: LIB3493-047-P1-M1-B6
ctttgaatgacaactttgttaagcttgtgacttggtatgacaacgaatggggttacagttcccgtgttatcgacttgatccgacacatgtctaaggcttaagtgagtgagtgattgtctttgtgtatccaagctttagcaattttaatttagaagagatgttatgagagaataaacgaattgtacggagcatatttttgtgtgaagaagggttgtttcagttttattacccaagtacttgaatgtttcaagtttcattgcagntgtttctctactttaatgcatatgttgngattatggcttgtctactt

SEQ ID NO: 1766 - DNA, 125 bp, Gossypium hirsutum
  Clone ID: LIB3493-047-P1-M1-B7
tttgtatttcatactcatttagcccctttcattagcatcgaaatcactccagggggcgttatcactgaaaaacgtcttgctgcgccggaaactgtggctgccgttctgtctgcacgaagtggcac

SEQ ID NO: 1767 - DNA, 145 bp, Gossypium hirsutum
  Clone ID: LIB3493-047-P1-M1-B8
cggacgcgtggtccgacgcttgggaggcaagtgagatgggagcagcaagcaagggagacaagaaaaacagttctacttcaacatcaccttgtgcccatctccgatctgcttaccacaattgcttcaaccaagtggtacctctgag

SEQ ID NO: 1768 - DNA, 345 bp, Gossypium hirsutum
  Clone ID: LIB3493-047-P1-M1-B9
attggaggaagtgctaacccaacaataaacagccaagggaatagatttactggacctgacaacagattcagcaaagaggtgaccaagcatgaggatgcaccggagagtgaatggaagagctggaattggagatcggaaggtgacctaatggtgaacggtgcattctttatctcgtcgggtgctggcgcctcgtcgagctatgccaaggcttcaagcttgggtgctaggccatcttcactggtggcaacgataacgaccaatgctggtgcacttaattgcaagaaaggttcacgttgttgatgataatgatggcgacacatgtgagtgaaacaagacagtttatta

SEQ ID NO: 1769 - DNA, 242 bp, Gossypium hirsutum
  unsure (1)..(242): unsure at all n locations; Clone ID: LIB3493-047-P1-M1-C1
gtatatgactatacgcaccatatccaccctacgatcttgttggttctgtattgtgtgcatgtatacttttgtttagagattatcctagtaacggtggcgaccttgactcgagccttgtgggtnctcgagccctagagaaacagtttaaccgaaccctatctctccacctcgctgcaagatttctggggtaagagatggaacctcatggcaactagtgttctacgaccgacggcgtacgaacc

SEQ ID NO: 1770 - DNA, 392 bp, Gossypium hirsutum
  Clone ID: LIB3493-047-P1-M1-C10
attttctctctttagaacaatcccttcatccaaaaacccaatacaactgttaacaagccctataaagaggaagataaagtttcttccaacgattaaagagagaaaatagagggaaatccaggcacatgcacctagtagaggcaacttcgatcaactaggaaatacagacgatttgtatttgaagaaacgatcaaggatgcgtcgttggctttgctgttcctgtcaagcagaggagagttaccaagcacatgaaaatgagcacttgaaagcccccaaggatcatacagatggaaatcatagaaactcaagggtggcagctcctgtcaaacctgaagtgcaaaaatcaccaccacctatcgaagttcctgcactatcgttggaagaattgaaag

SEQ ID NO: 1771 - DNA, 410 bp, Gossypium hirsutum
  Clone ID: LIB3493-047-P1-M1-C11
ttcataaatgtagaccatatatttataatacgagtaatatataagagttgagtgtggtaggtctcagacatggctcttgatggaagagctatatccactttgatcatcataatacttggaccaaagcataactccgccgtacttggaggaattctttatggcagggaggacctcggatgtgagatcgtttacagggatgaaaccgctgcctgctgcatcaagagctgcccggaagcccaggaaaatcttggttgctgggatatccgaagtccattggttccatgcatcttcaagggtggcaaaatcggccgccagtattggccaggagggttggtatagaattggaccccaacataatcaaagagacccgttttcaatgcatttcccaccccagcctacggaatgggcct

SEQ ID NO: 1772 - DNA, 281 bp, Gossypium hirsutum
  unsure (1)..(281): unsure at all n locations; Clone ID: LIB3493-047-P1-M1-C12
aaaaaaagagagatggcgtctgtaataaaatctgcaatcttaattctgtcggtggggtatctgtacgcttcagttcgggtgttaggttgctccaggaacagcccaatgatgacagcaaaaacatggacgctattcctcccattgatgcactcaaccctaccgagttgaatggacccggtgttggcattcacgaagatcatgttgccccaacaggtgctgaaatcggtactatcggttctggttttgaaggtggtcctgataaatgatgntcttctggatgt

SEQ ID NO: 1773 - DNA, 377 bp, Gossypium hirsutum
  Clone ID: LIB3493-047-P1-M1-C2
ggacagttcctttgattttgagagaaaagagtagatcttggcttctctccttcgggggttccgcttaattatagcccgcgtttctctcagacgtgaaaaatggggctgtctttcacaagctatttagccggcttttcgccaagaaggagatgcgtatactcatggttgggcttgatgctgcgggtaaaactaccattctttacaagcttaagttgggagaaattgtcactaccattcccaccatcggtttcaatgttgagaccgttgaatacaaaaacatcaactttactggttgggatgttggtggccaagacaagatccgaccattgtggagacactacttccaaaacacccaaggacttatttttgtggttgat

SEQ ID NO: 1774 - DNA, 248 bp, Gossypium hirsutum
  Clone ID: LIB3493-047-P1-M1-C3
catacctcccttaaaatataataaccctttcccttcactactcaaaatcctattcaatgctcccatggcttcgaatgtttctaagagtcatagttttggattgacatctatagctgagagaagctcgttggcgctgtgtccttgtgctggtaaccctgtcattgctcaactctctcaaggaaactaactataccataacaaaggatgaggattatgatgggaaaggcgtgagtcgctaggcgcttcaa

SEQ ID NO: 1775 - DNA, 394 bp, Gossypium hirsutum
  Clone ID: LIB3493-047-P1-M1-C4
gttttgttgagttgacaattcaagggatgctgaagatgcaattaggggtcgagatgggggcaactttgatggttgtcgtttgagggttgagcttgctcatggtggcagaggacaatctcaagtgatcgtcggggtggatatggagggggtgcagctaaatttggcgtctcacgacattctgaatatcgagttattgtccgtgggctcccctcttctgcttcctggcaagatttgaaggatcacatgcgaaaagctggtgatgtgtgttttgccgaaatttcgcgtgacagtgatggaacttttggtattgtgattataccaattatgatgacatgaaatatgccatccgcaaacttgatgacaccgaatttagaaatccttgggcaagggctta

SEQ ID NO: 1776 - DNA, 271 bp, Gossypium hirsutum
  unsure (1)..(271): unsure at all n locations; Clone ID: LIB3493-047-P1-M1-C5
cggacgcgtgggcggacgcgtgggctacgaaggtgaaagaacaaggaccagagacggcaacttgctcggtaaatgtgagctctctggcatccctcctgctcctagaggtgtcnacaatcactgtctgctttgatatcgatgctaatggtatcttaaacgtctctgccgaagacaaaaccactggacaaaagaacaaaatcaccatcacaaacgacaagggccgactctccaaagaagaaattgaaaagatggttcaagaagcagagaaata

SEQ ID NO: 1777 - DNA, 386 bp, Gossypium hirsutum
  Clone ID: LIB3493-047-P1-M1-C6
gttgcattaaatagtgatgctttaccagtccctgcaactcttggttgtgaagaagaccgggatatggaagctgtgtgaaagcagtgagggaaaaagaggtaagacactagatgaggacagagacttcaatcagcaatagacttcaaaactgcgtcaaatagtgatggcgatcatttcaaggacgccaatgggtctaccctgcagtttgattccactagggacggaactgtacaggtaggctcacaaatagaagacaaaaattgttcgacattaaaagaagttgctgaaacaggtggtgctgcatctactgcgaatgggttaccttcttcaagatacagtaagccagctgaagtggaaaaagaagaaaaccatggaaccataaatga

SEQ ID NO: 1778 - DNA, 314 bp, Gossypium hirsutum
  Clone ID: LIB3493-047-P1-M1-C7
gagaaaataacagtgttgggattgagtggaagtgtagacacatctggccttgagaggaatggaagtccggtagccaatggtgcttccaacatagaattgacctcagtggaacagatgcatttgcaggatgttgaacatggggttggcaagaagaattctctaacagtgtcactattatgcttgaacttatatgttgctcatgaagtcttacatgtccatgaaaatgggggtacaaggctgatgattatagcgatgttggactcattgtatgcaaacacactctccttaccgctattgatgatactttcctggtc

SEQ ID NO: 1779 - DNA, 295 bp, Gossypium hirsutum
  Clone ID: LIB3493-047-P1-M1-C8
gaagaattagccagagaaaagctggctggagttaaccctgatataatccgacgggcgtcaataattacctacagcaagcaacctatatcctaaagtatatggtaatcaaaacaggcataaccaacgaacacattgagcacaacctagagggactaacagtagaagacgcactgagaaccaacaggttattcatattggatcatcatgatatacttatgccgtacctgctgaggataaacactacgacaaccaacacttatgcgtctcgaaccatcttgcttttactcaatgatgg

SEQ ID NO: 1780 - DNA, 399 bp, Gossypium hirsutum
  Clone ID: LIB3493-047-P1-M1-C9
gttatgggaagagacttaaattgggttaataacagtttacagtatagagagaagctggcattgctgcgttggcagaaaagactgctctaaattcttgtatcgtgtcttaaatgcctttgcaacgacaagaaaaacaaagttaagttcaaaagccaggccagctgccgcagcacaacgaaaaatccttgaggaaagtgaaaggggaagcaagcaaagctttgattcgagtataaaccctgcgcttttcctacacaaccccttggcatcgtgtgcttaaacacgtgcaaaaagagaagaattggcaatagcggctgtgggaaacaaaaaacaatcggcttctgaaaatcaaaagaaaaaggtccggaagcttatcatatggattgcctgacacaatttaag

SEQ ID NO: 1781 - DNA, 388 bp, Gossypium hirsutum
  Clone ID: LIB3493-047-P1-M1-D1
cggtgattaaacccatgttggattttttgaaacaaaccgggtcttacttaatgggggtgcgtacccgttttttgcttattcggctaattcggatcagatctcacttgattatgcttgtttaaggataacccgggtgtagtagattcgggtaacgggttgaaatattctagccttttggaagctcaaatcgacgccgtttttgcagctatgtcggctattaaatacgacgacgtaaagatggttgtgaccgaaacgggttggccatcaatgggcgatgaagatgaaataggtgctagtgaatccaatgcggcgtcgtataatggtaatttagtacggaaagttttgaccggtaatgggacccctttaagacctcaagacccacttaacg

SEQ ID NO: 1782 - DNA, 150 bp, Gossypium hirsutum
  Clone ID: LIB3493-047-P1-M1-D10
cggacgcgtgggggagagttcgtcgtgaattcaaggctaacaagatctctgaggaggattacattaaagccatgcaggtggaaattaagaacgttgttcaccttcaggaacacttcacatttatgtcttgtattatagaaagcttgttac

SEQ ID NO: 1783 - DNA, 303 bp, Gossypium hirsutum
  Clone ID: LIB3493-047-P1-M1-D11
gttttagggggtgcggaattagactcgattcgtaatttgcaatcaaatcgtagagggcgactaaattgccgtgaaggaagaatgggaaggtggagtcaattcttggttgcgggactattctgagcggtgggcactcctttcggcatcagccaccgctagaccctgcaagacattcttcgtcgcctcctattctttctcttttgaaaaccctaacgacctttcttcctccaccggattcgtcgccgtcttcaccgagatcggtcaattgaacgtcgtaccaccaagacccaagccctccgatgt

SEQ ID NO: 1784 - DNA, 295 bp, Gossypium hirsutum
  Clone ID: LIB3493-047-P1-M1-D12
ggcggtgttatgactgttttgattccgagaaacactaccattcccaccaagagggagcaggtgttttcaacttactctgataaccaacccggtgtcttgatccaagtttatgaggtgagagagctcgaacccgggacaacaatttgttgggtaaattcgagctctctggcattccaccagcacccagaggcgttccccaaattacagtttgcttcgacattgatgctaatggtatcttgaatgtctctgctgaggacaagactactggccagaagaacaagattacgatcacaaa

SEQ ID NO: 1785 - DNA, 419 bp, Gossypium hirsutum
  Clone ID: LIB3493-047-P1-M1-D2
catttctgctcccagtaaggatgctcccatgtttgttgtgggtgtcaatgagaagggatgtaagcctgaccttaacattgtctccaatgctagttgcaccaccaactgtcttgccccatggctaagagtgatcaaactgataaatttgagcattgttgagggtcttatgacacactgtccatgtctattacttgctacacaaacagactgttgatggtccttccatgaaggactggagaggtggtagagctgctttcttcaatatcattcctagcagcactggaactgccaaggctggcggcaaagttttgccaacactgaatggcaagctgactggaatggctttcccggttcccactgttgatgtctatagggttgaactcactgtgagacttgagaagaaggctacctatgatgaa

SEQ ID NO: 1786 - DNA, 173 bp, Gossypium hirsutum
  Clone ID: LIB3493-047-P1-M1-D3
gaaacccttatgcggcgactactcgagcttcataacacccgaagcttttaactatggcggatgtatagactgaggatgcgacggccgatgtgccaaataagaacattcatgagttagcttacgaggtgtcatatggaagctttcttgatatgccactgtgagctagcaagctc

SEQ ID NO: 1787 - DNA, 333 bp, Gossypium hirsutum
  unsure (1)..(333): unsure at all n locations; Clone ID: LIB3493-047-P1-M1-D4
accaattcccttcaatttctccattttctctgaaatccaatggatccagtaagcaggtggggcaattcctccctcgactccgtcgatcccgaaatccatgacctcatcgagaaagagagcgtcgccaaatgccgcggcatncgagctcatcgcnttccgagaacttcacttgcttcgccgtcatcgaagccctcggcagtgccctcaccaacaaatactccgagggcatgcctggtaaccgttactacggtggaaacgaattcattgatgagatcgagaacctctgcagatctcgcgctatccaggctttccacctcgaccctaccaaatggg

SEQ ID NO: 1788 - DNA, 358 bp, Gossypium hirsutum
  unsure (1)..(358): unsure at all n locations; Clone ID: LIB3493-047-P1-M1-D5
gccacacatcccacagtgaatattgcgtcaataccatagtcccaaagccgccattatgcnnggaaaggatcgccagtgaccactttgggttgggcacaaataaaagctctggaaccgaaccatcatagctagtctacttaatgattcttcttccatcttaccagtagcaaagaaccctctacaggccaaagagcttctccaaatatgttgggattctaacatgaacaccatggaggacctttggattgctagcagtttgctttacaataagatcatcaatcccatgattgctcgtctgtatcatgctgcaaataccactagagtttgccaagatggcttaaaaggaaccggtttacag

SEQ ID NO: 1789 - DNA, 255 bp, Gossypium hirsutum
  unsure (1)..(255): unsure at all n locations; Clone ID: LIB3493-047-P1-M1-D6
ggcaagtcactgttgaacttcaagcaaaataggaggtcaagtgcccgaaatgaacctganactgatgctatatgctaccctaatcatcagttgcagttaccacgttaccattctgtcctactgagcaagtgcactcaggcccacaagctggaggatttaatgataatcagtctacgagatactcgggacaatcagagcttgtgaattcgaattctcgtagtcaatttgacggcacacaatttttgcaatatgatc

SEQ ID NO: 1790 - DNA, 154 bp, Gossypium hirsutum
  Clone ID: LIB3493-047-P1-M1-D7
cggacgcgtgggttttttttttttcgtatttatccaaatttctagggttacattgttggatcgatctgagagagggagactatgggtggggaaggcaattccagtgagtcatactcggtaccaataggagaagatgaagggagtcgctggttaa

SEQ ID NO: 1791 - DNA, 156 bp, Gossypium hirsutum
  Clone ID: LIB3493-047-P1-M1-D8
atagtcttgtagatgggaaaattgttggaaggtggaagataaacctagcttggtggaggtatattattctcacctaccaattcaaaatcaaaagtgatatgatccactctcgtatgcccaagatgtgatatatatttaatttatttggttccttgc

SEQ ID NO: 1792 - DNA, 448 bp, Gossypium hirsutum
  Clone ID: LIB3493-047-P1-M1-D9
cgcagctcgcacgctctcatcattttcctccgggaccgtcagtcttcccaaagccgtctttccgagaaaaaaaaaagctcaagagagaagaccatggccgatcaacttacggacgatcagatctcgtgagttcaagggaggctttcagctctctttgacaaggatggcgatggttgcattactaccaaggagctggggactgtgatgcggtcacttggtcagaaccctactgaggcagaactccaagatatgatcaatgaagttgatgctgatggaaatgggaccattgattttcctgaattccttaacctaatggcaaggaagatgaacgatactgattccgaggaagaacttaaagaggctatcagggtgtttgacaaggaccagaatggtgtcatatctgctgctgaacttcgccatgtcatgacaaatctcggggagaagctta

SEQ ID NO: 1793 - DNA, 447 bp, Gossypium hirsutum
  Clone ID: LIB3493-047-P1-M1-E1
aaacaggttgcgggtttcaaaccaagcaaagatacagatttgggtggtttagcatgaggctgaagttggtcggaggtgactctgctggcgttgtaacagcttactatatgtgttctgagaacggggcagggccagaacgagatgaactggattttgagttcttggggaatcgaacagggcaaccgtatttaatacagacaaacgtgtataaaaatggtgttggaggccgtgaaatgaggcacatgctttggttcgaccccactgaagagtttcattcatattccattctatggaacaaccaccaaattgtgttttttgtggatgaagttcccataagagtattcaaaaacaatggtgatgagaaaaacgacttctttcccagtgagaagccaatgtatttgttctccagcatatggaacgcaaatgaatgggcgaccagaggtgggt

SEQ ID NO: 1794 - DNA, 326 bp, Gossypium hirsutum
  Clone ID: LIB3493-047-P1-M1-E10
ctttccaagcttcatcgccaacttaaagagtttatcatcctttgtttttattggtgagattcaactcaaatggaggcaactcatcataagaaggggttcttcaaaggcaaattaccatagtctttctcttcgaatcaccaaggcaaggacgaccagtagcggaagcaacagcagcagcaaggtggttccctgctccacgccatcatcaacatcatccatgtattcgtctattccaaaagtgtccacctattcttacgcaagctccaagcagccaattaattttcgtgaacaaaagaatgttgcagaacttcccccatctattccaa

SEQ ID NO: 1795 - DNA, 365 bp, Gossypium hirsutum
  Clone ID: LIB3493-047-P1-M1-E11
ataaaatctctacctggatagccaacagagaccgctgtttaccatatcctccggagaattttctaggatgcgggcataactcattaaacctaaatatcatttttaatataattggttgcaaagctcttatataatgtagacgaaatatttaactgtctgcaaggtgtatcatgtaaaaagacaatataagatctaatccaataatactatactatttcaccactctgacatacaaggtagtgctgataatctttgatactgcccttcatctcatgatatcaaatcacaatggattgctaattttcgaaggcattctaccaacgatgaacctatgattgttaaagatgtatttgatatcttatcca

SEQ ID NO: 1796 - DNA, 340 bp, Gossypium hirsutum
  unsure (1)..(340): unsure at all n locations; Clone ID: LIB3493-047-P1-M1-E12
ggtgatgaatgctgtgcccacaattggcaaggacaccttaggtgtgatctatgagagaggtctaattggaatatatcatgactggtgcgaaggtttctctacgtatccaagaacatatganccttatgcatgctaatgtgtctttagcttgtatcaagataagtgtagctttgaagacatccttctggaaatggatcgcattttacggcctgaaggagctgtgatattccgggatgatgtcgatgtcctaaacaaggttaggaaaattgctggaggcatgagatgggacaccaagatgaatgatcacgaggatggtccccttgtgcccagagaaaattct

SEQ ID NO: 1797 - DNA, 451 bp, Gossypium hirsutum
  Clone ID: LIB3493-047-P1-M1-E2
gggaaacaagataaaaagtattttgctttgcctaattgtaagctttgaggttaaggggggaaactatggctgaagagggacaagtaattgcctgccacactgttgagtcatggcagcacagctccagatgggaaacgagtccaacaaactggtggtggtggatttcacagcatcatggtgcgggccatgccgttttatatcaccaatcctagtggatcttgctaagaagctgcccagcgtcatattcttgaaagtggacgtggatgaactgaaatctgtcgctcagtcgtgggctattgaagcgatgccaacttttgtgtttctgaaaggaggcaccataattgacaagcttgtgggtgcaaggaaaagataattgcaccaaaaaattgccttccattcatctacctccgtgcaaacagcatgaatcaacatttaaatgtacttgatgtct

SEQ ID NO: 1798 - DNA, 439 bp, Gossypium hirsutum
  unsure (1)..(439): unsure at all n locations; Clone ID: LIB3493-047-P1-M1-E3
gcctctttgtagcattgagtaaaatgaatctcaacaacctcaaagttcctaagatncgtcgaggctgagcacttgctgctttgcttaacattggagtcattggtgggcttggcctctatggagttgccaatagtctctacaatgttgacggagggcaccgagcaatggttttcaatcggattttgggcatcaaagataaggtttattcagaggggacgcaccttatgatacccatggttgagaaggctatcatctatgatgttcgggccagaccttatttaattgagaagaccttctgtagtccggaacttcaaatgggccaaaatgggctttgaggtcttacttccccccaggcaacttaattaacttaaaattaatcaacccttggtgagaacctttatgaggagggtctggccttaattatttcttaaactttaaa

SEQ ID NO: 1799 - DNA, 297 bp, Gossypium hirsutum
  Clone ID: LIB3493-047-P1-M1-E4
aaaaaaaaggccctctaacaactctcctacattagaaatagactcatccttagaaccagtataatcatgaatgacaaggatttcatcaagaaaatggcgctctctccctcattgtagcttcttttgttggctggaacaggaactatgttgttcagtacattatagagctgaaggtcaactctggcaacttactatctcagttcaaagggcacaatgttcatctctcaatgcagaaattcagcagccatgtggttgaaaaatgcctcaagcattttgcagagagtagatctcagatca

SEQ ID NO: 1800 - DNA, 389 bp, Gossypium hirsutum
  unsure (1)..(389): unsure at all n locations; Clone ID: LIB3493-047-P1-M1-E5
ggaagataataaagcatttgtctcagatctcagaagatggcccgtaccaagcaaaccggcggtaagtctactggtgggaaggctccaaggaagcaacttgctaccaaggctgcccgtaatctgnccccaacccaccggtggtgtgaagaagcctcatcgataccgtcctggaactgttgctcttcgtgaaattcgtaaataccagaagagtactgagcttcttatcaggaaaatgcctttccagaggcttgttcgtgaaattgcccaggacttcaagactgatttgcgttttcagagccatgctgttctagctctcaggaagctgcagaggcataccttgtgggtctttttgaagacaccaacctttccccgatccatgccaagcgtgt

SEQ ID NO: 1801 - DNA, 361 bp, Gossypium hirsutum
  Clone ID: LIB3493-047-P1-M1-E6
atttccatccccaaaatcgatatcttcagattaattgatccatcaaagccctctgcgagaatccctactttcaagtttcgatccgatcgacgctgctgttgttccttctgccgattactgataaaggagaaatgccatcgcagaagattgaaactggccaccaggacacggtccatgatgtggccatggatttttatggtaagcgtattgctaccgcctcatcagacagcacaattaagatagttggggtgagcaacaacacacatcagcatttagcgactctgacaggtcaccagggaccaatatggcaggtggcttgggctcatccaaaggttggctctttacttgctgcttggtggta

SEQ ID NO: 1802 - DNA, 271 bp, Gossypium hirsutum
  Clone ID: LIB3493-047-P1-M1-E7
ataactgcaaggtccttgttaatattgagcagcagagtcctgatattgcccaggatgtccatggccactttacaaagcgtcccgaagagattggagccggtgaccatggccacatgtttggttatgctactaatgagacccctgaacttatgcccctaagccatgtcctcgcaactaagcttggtgctcgtcttactgacgttaggaagaatgggacttgcccttggctaatgcctgatagtctaacccaggttactgttgaaaacaacaa

SEQ ID NO: 1803 - DNA, 243 bp, Gossypium hirsutum
  Clone ID: LIB3493-047-P1-M1-E8
aacatatttcgaacgtttcatgatcaatgtccttagcaaatatacacagattttgggaaactcagcctgttggtcaattaaaggatgctgggcacacaagattacctgaatgcacaattgacccacctaatcaatcctctgaagtcaaacactaaccttattacctttcgagcacgaatcaatggaccacatgagacttgcatttggcagaaactccaaatggggattacaaggctttgaaga

SEQ ID NO: 1804 - DNA, 99 bp, Gossypium hirsutum
  Clone ID: LIB3493-047-P1-M1-E9
ctcggtgttgactgtgatgggagtccttaaggacaaaaccaagtgtacaacgggggggattcaagggattggttgggcttttggtggtattatctttgc

SEQ ID NO: 1805 - DNA, 296 bp, Gossypium hirsutum
  Clone ID: LIB3493-047-P1-M1-F1
cttcttcatggttggatttgctcccttgacatccagatgatcacagcagtaccggggactgactgtgcctgaactgactcagcagatgtgggatgctaaaaacatgatgtgtgctgctgacccacgccatggccgttacctaactgcctgtgcaatgttccgtggtaagatgagcactaaggaggttgatgagcaaatgattaatgtccagaataagaactcgtcgtactttgtggagtggatccctaataatgtcaagtctagggtgtgtgacatcccacctaagggtctgaaaa

SEQ ID NO: 1806 - DNA, 240 bp, Gossypium hirsutum
  Clone ID: LIB3493-047-P1-M1-F10
gggtggagaccatgtcttgaatctgtaaataccccatcagcattgccacagaacggtgaaggatatcttcaggtatttcttgatggtggactcaaccagcaaagaatggggatatgtgatgctgttgcggttgctaaaatactgaatgcaacacttgtgatcccgtatcttgaagtaaatccggtttggcaagattcaagctcattcatggatatatatgatgtggatcactttattaat

SEQ ID NO: 1807 - DNA, 341 bp, Gossypium hirsutum
  unsure (1)..(341): unsure at all n locations; Clone ID: LIB3493-047-P1-M1-F11
ggaaaacatacaacagagagagagaaaatgtttgcatacgatcgcgtaagccacgtgcgagtgccaacaaggcggatgagatagatctagaatcaggggagactttgtacccggactcagnctacggcgagaaccaactccggtggggttttatccgcaaggtttacggcatcttggcagcgcagttggttctaaccaccgtggtctccgccttcgtggttctttcggctccggtcaacgagctccttcgtggaaattctggcctcttgctcttcctctgtttaatccccttcgtcttgttgtggcccttgcatgtctatcaccaaaagcaccctgtgaac

SEQ ID NO: 1808 - DNA, 421 bp, Gossypium hirsutum
  unsure (1)..(421): unsure at all n locations; Clone ID: LIB3493-047-P1-M1-F12
ggcaaattccaagagctaaaaaacccgcactacatcaacctgagagcactcagtcgacaagtcccccatgggtaaggatcatggatctttagctcgagccataaggtgagaggtcaaacacctaaagtggctaagcaagacaagaagaagaagccccgtggccgcgcttacaagaggatgcaatacaaccgtcgtttcgtcaccgcagtggtcggattcggcaaaaagaggggacctaactcatctgagaagtaagaactatgcaatttaaaaaagctattgtttgaagcttttatggatttaatctggatttttccctgtttgtttgtaatgttttatgatacttatttttatccactggtagtaaggatcaagtngaacttgaagttttgttatctaaatattatgtgattttgatatt

SEQ ID NO: 1809 - DNA, 221 bp, Gossypium hirsutum
  Clone ID: LIB3493-047-P1-M1-F2
ttttctttcttctttcccctaaattgcattttctcaaaaatgtcgctcctccaatcttgcgtctatcctccgtcaacacttcgttcttcgccgtcactgtcatgcacagcggcacacccatcgcctcctcccatagagttccttccacttcgaattccttcgtcgcgttagaatcgtcatcgttaaagaccgttaactctatttcgagcgctaagaacaat

SEQ ID NO: 1810 - DNA, 135 bp, Gossypium hirsutum
  Clone ID: LIB3493-047-P1-M1-F3
aataaatggaggcaaaaaccttccaactttaaaatgcttaaaactctattgccggcctattccgtaaaaaaaaattccattccaatgattttttttgatcccaatttttacttattaaaacctccttttttatta

SEQ ID NO: 1811 - DNA, 353 bp, Gossypium hirsutum
  unsure (1)..(353): unsure at all n locations; Clone ID: LIB3493-047-P1-M1-F4
cggacgcgtgggttcaaattttccaccaaaaaagaaactccattaatggctcttcctggccatatctaagctctggataaagccttctcaggaattggagtggatgagaagtcactaatctctatactganccaattcaaaccgaggaacacnaaaagatccctaaggaagggaagttccaagttgttcattgaggatgaaaatggatttgaacgatgggaccaatcttccattaaaattctcaaacaccaattcaaccgatttagggatgctgtggtgctttcactcctacacccatgggaaagagatgctcgtttgattgaaaaagcaataagaaagggcccaaacactat

SEQ ID NO: 1812 - DNA, 150 bp, Gossypium hirsutum
  unsure (1)..(150): unsure at all n locations; Clone ID: LIB3493-047-P1-M1-F5
cgcattgtttgaggaaaaacacaaatgagttgctgtggctggcttgtgtttcactgacagatcagtttgttcatgagaggctaacagatgagaggtatgaagcangggttatggacttcagcagcatattaacaagtttaggaatctgga

SEQ ID NO: 1813 - DNA, 415 bp, Gossypium hirsutum
  Clone ID: LIB3493-047-P1-M1-F6
cttctttcaaccacgcctgataaccgctcggatttttctcagacgtgaaaaaaatggggctgtctttcaccaagctattcagccggctatttgccaaaaaggagatgcgtatactgatggttgggcttgatgctgctggtaaaaccaccattctttacaagctgaagttgggagagattgtcactaccattcccaccatcggtttcaatgttgagaccgttgaatacaagaacatcagcttcactgtttgggatgttggtggccaggacaagatccgaccattgtggagacactatttccaaaacatgcaaggacttattttcgtggttgatagcaatgatcgtgaccgtgtggttgaagctagagatgagttgcacaggatgttgaatgaggatgagttgagggatgctgtgct

SEQ ID NO: 1814 - DNA, 435 bp, Gossypium hirsutum
  Clone ID: LIB3493-047-P1-M1-F7
attcattggaagcgccacttgccaaatttcactctttcaacatgcaaatgcccgggagatgagcctctccatcttccccacttttagtatatctcaaaaatcaatgttacccactctatttcaagcatgaaatccctaatttcccctcccttttctcccttatctcttcatttccccaaaaccaaaccttttgccttcttctctttaccctcaaaaccccccaatgtttcgtaccctaaatttctccacgcaaaaccttcaatgccttcgccaagacccccgattttttcaatcccgattcgacaatcgcatatagagacaccccaatcttcttcgccgagcggtgaggtccacgtcatcgtctgacccatgtttgctggcaagacaaccacacttctccaccgaatccaagctgaaagcaacaatggccgaact

SEQ ID NO: 1815 - DNA, 481 bp, Gossypium hirsutum
  Clone ID: LIB3493-047-P1-M1-F8
caaaacacatcactgcccttgcactcggatcataccaatcaatcaaaatccccgagggaaatattaaaaaaaatgagctctcagattttcagatctgcttctagagccgccaggctctcctttcagcatccaaggcttctcgcttttactctgaagggcgagctgtagctgccgctgcagcagtttcacttggcggtaaagtgcctcttttggcttcagcttatggaagtactgcttctgccaatgcatctagagcatggctttcaggagtttttgctcttccagtggcagcttacatgcttcaggagcaggaggttcatgctgcagagatggagcgcaccttcattgctatcaagcctgatggagtgcaaagagggctgatttcagagatcatctctcgttttgagcgcaaagggttcaagcttgtggctatcaagttggtggttccttcaaaggagtttgcccagaaacattatgatga

SEQ ID NO: 1816 - DNA, 450 bp, Gossypium hirsutum
  unsure (1)..(450): unsure at all n locations; Clone ID: LIB3493-047-P1-M1-G1
aaactgtgcatactggataatttgtatcgtttggctaggagtgccgaacaaaggcgtagtggcacaaaaacaaaaagtggcatcagtgatcgtaattatggaagtggttcatagcgtcgaagaaacaaacaggtgcactgggtttatggatatggaaactgacacaaaccctatagatagatccatagcacacctactatttcacaagacttcagatccatctcaaaggccagttactgatactgcattgttgaagtctcatggcaagattcatggctctatcacgaatccacctctgatgatgcctgaaaaacacattggccactaagaaactgatgccggttcagataaaaaagtgccaacaaacactaacaacaggtaactgggaatttattaatatctntgtaaaatttaatctatttgtttatgataatgccaaatggtggtcca

SEQ ID NO: 1817 - DNA, 103 bp, Gossypium hirsutum
  Clone ID: LIB3493-047-P1-M1-G10
cggacgcgtgggtttaaaatgtacaatgtatagcaatctatacaaaatctttggaggataaaaacaaactgcttacttagtagcagtaatcttatattctggc

SEQ ID NO: 1818 - DNA, 85 bp, Gossypium hirsutum
  Clone ID: LIB3493-047-P1-M1-G11
cttcaagaccattcgacaatggtgacaatccctttctttggcctaatcatgggggggttcctctccagtgcggggggcacaccaa

SEQ ID NO: 1819 - DNA, 121 bp, Gossypium hirsutum
  unsure (1)..(121): unsure at all n locations; Clone ID: LIB3493-047-P1-M1-G12
aattttcccgcattttctttattgtttttcacactatccaaacagtatcttgggagagtagattaaagtgtagaagttcttcaatggcgatggangataataaaggaaacaagagactcga

SEQ ID NO: 1820 - DNA, 391 bp, Gossypium hirsutum
  Clone ID: LIB3493-047-P1-M1-G2
caagaacaggacatcgtcatcgtcggcggtggtatttctggcttggccaccgcccggggtcttcgcaggaaaggagtaaagagcatggtgttagagagatcggaaacgctgcgagccgcggcgttggcatcattatgcaaccgaatgggtggcgtgcacttgatcagttgggtgttgccgccaagcttcggcagacttgcactgaaattccatcgggagtatttatatcagttgctgagggcaagtgtcgtgaatcaaaattaccttttgggaaaggggaattacgttgtttgaaacggatggagctgatgaaggcactatcggaggaattgcctgtggaaagtgtgtatttgggatgccgagcgggctctattctacttgaccctcttac

SEQ ID NO: 1821 - DNA, 53 bp, Gossypium hirsutum
  Clone ID: LIB3493-047-P1-M1-G3
gggtgctggtggtggggggcttgccctaggcatgcctagcggaaacccatccc

SEQ ID NO: 1822 - DNA, 178 bp, Gossypium hirsutum
  Clone ID: LIB3493-047-P1-M1-G4
tgaaagttctcttcgatgtcttttagatcattctcacccttctcatcccatttcatcagcaatctatacacctaaatcctcctccttttcatctgttttggaatcttacattaaaacctacgattcaacgagttcctgcacaccaaagcctttccttattctgactgcactccatgaa

SEQ ID NO: 1823 - DNA, 342 bp, Gossypium hirsutum
  unsure (1)..(342): unsure at all n locations; Clone ID: LIB3493-047-P1-M1-G5
cgaagcttccttttccgttttagatctcaaaattcaaaaggctctctttttcatcgtgcagggctgctactattggctccgtcaaagctaggcagatcttcgacagccgtggaaatcctacggttgaggtgtgatgtggaaacatcgnaacggtataaaggctagggccggagttcctagcggtgcatccactggaatttacgaggctcttgagtcgagagatggaggttcccattacctcggtaaaggtgtatcgaacgctgttgctaatgttaacacaatcatcagccctgcgttgcttggaaaggtcccaacctagctgactgcaattgacaatttcat

SEQ ID NO: 1824 - DNA, 130 bp, Gossypium hirsutum
  unsure (1)..(130): unsure at all n locations; Clone ID: LIB3493-047-P1-M1-G6
ggaaaacagaaggcagttctcttatcacgatgtttgcagatccacttatgcccgagaagatatattctcttcacacgggaggggtagactcaatagtgctgcattttctcccttttacatatcanattaa

SEQ ID NO: 1825 - DNA, 120 bp, Gossypium hirsutum
  Clone ID: LIB3493-047-P1-M1-G7
acgggctggtctactcaacactctgtggtggctcttagcagactcaggactcagaggcgggggattttttggggaggctgaaggaaccttctatcacataatcgaccaggcacctgcagc

SEQ ID NO: 1826 - DNA, 175 bp, Gossypium hirsutum
  unsure (1)..(175): unsure at all n locations; Clone ID: LIB3493-047-P1-M1-G8
tttcttctagaatccaactcggataatgctgtagttcatagaatatccgatagggaggtgaggaaaggttcgatgaataagcatggcangcattggaagggtgtctacattctgttttcaatacatacttgtggtgggtgacaggccaagagatctagaggtggagagggttatc

SEQ ID NO: 1827 - DNA, 384 bp, Gossypium hirsutum
  unsure (1)..(384): unsure at all n locations; Clone ID: LIB3493-047-P1-M1-H1
catctacaagaacttgatataagcttctgcgatcgactagagcaagtcattggttgtgggcaagaagacgagattattgagaatgactctcctctttgttgctggcctaaattgaggatcttcgcatagnaagtttgcccaaatttgaaatatgtttgtgcgaacacttggactcaatggcttcttcaatccttggaatctgtttacataacaggttgttctcaacttatacatgtcctcaacatggaacaaaataagcatggacaagatattgtgcttcctgaacttggatcacagaatcattgctggacaaaactgaaaactctctggatagaggattgtcaactattgaaatatgtggttgcaaacactttatctcaagga

SEQ ID NO: 1828 - DNA, 287 bp, Gossypium hirsutum
  Clone ID: LIB3493-047-P1-M1-H10
tgctaattcaactttgactgtttcagattttccgtgaaaatcaagaaggaaaaaagacccttaaaatcaaaaccctaatcctattttttttttcctttttgatggtggaaaacaagcagggccctcaacttggacaacatgggtgtctgaacagaatcaaggaaccagctttcccccgtcggagccgaagctttgcgctaacggttgcgggtttttcggaacggcggcgaacatgaacctttgttccaagggttaccggaacctccgtgctggggaggagcaagcgg

SEQ ID NO: 1829 - DNA, 306 bp, Gossypium hirsutum
  Clone ID: LIB3493-047-P1-M1-H11
ctttttcttcggaaaagagggcctcaatctacatgtggttctgggcatgatcataggagtggctggaatgatttggtacggaaatgcttcatctaagcctggtgggaaagagcgtccagcctatctctttcctacaatccgacaacaaaagcccagcagtttatcggattctaatgaacatgattcgaaagtttgattctcctccatgtaggtaagttaaaagcatccagggttagctgatttcaaaaggctatgggttttttccatttgattagaaggaaaaaaccagccttagttttaatgatt

SEQ ID NO: 1830 - DNA, 306 bp, Gossypium hirsutum
  Clone ID: LIB3493-047-P1-M1-H12
gggcaacatctctcttccgccgtttgggttagcaacttacaagatgcaaggggacgtgtggttgtcctcctccggttgtggaggaggggaccaagaaggctattgtactttggtgttgccgattcgtggctaaagcaactaagcgttcaacaccatgacttcaactatttctcgggtattcgacgtggctaaaaaagccctctacatccctaataaacatggaaaaaagttcactcatcactcatttatcatcaaaagccaaaaaaaaaggaggaaaaaaaagaaagtaacattttgggttttttt

SEQ ID NO: 1831 - DNA, 242 bp, Gossypium hirsutum
  Clone ID: LIB3493-047-P1-M1-H2
atcttgcttaaactatatgaaaactaatcatactcactgaacactgctattcatgggggtcgttacaaacctacggtggcatgtgacgctgctaatccactatcgattgaataagtgaagtggcacctaccccaaaagcatgaattccgtattaagattctctgcactgctgtatgtcacactgatgtatactactgggagtgtaaagataacactcctctgtcaactcatatacttgctca

SEQ ID NO: 1832 - DNA, 241 bp, Gossypium hirsutum
  unsure (1)..(241): unsure at all n locations; Clone ID: LIB3493-047-P1-M1-H3
gattaatggctattgcaagagtcagaagatcgatgaaggtttccagctttttcggggaggcagtttcagggttgtgaaccgaatgctanaacctacaacacacttatacaagcacttgccgagtatggagggtgaggacggcaaaaaagatgttcgatgagatggatgtttgtggtactcaatctccgacatcattcacatatactataatgctggatggactctgcaaaaatggtcatgt

SEQ ID NO: 1833 - DNA, 198 bp, Gossypium hirsutum
  unsure (1)..(198): unsure at all n locations; Clone ID: LIB3493-047-P1-M1-H4
gtactcactcaacattcccatttgcaatctccagctcccaaggtaaatatgccgagcagaaacatatcggttgggcgggccgaagaggctactcaccccgatgctctcaaggcagctatggctgagttcatctcaaaccttgatcttcgttttcgctggatcgggctcaggaatggctnntaacaagttgaccgacaa

SEQ ID NO: 1834 - DNA, 110 bp, Gossypium hirsutum
  Clone ID: LIB3493-047-P1-M1-H5
taaagctagttcgcctgcactgtacctgccggtacttacttcctcgatccacccatgcgttctttctgattaaacataaactgcaatctatctttcttaagtgtctgaaa

SEQ ID NO: 1835 - DNA, 101 bp, Gossypium hirsutum
  Clone ID: LIB3493-047-P1-M1-H6
agtgcaacatctgtcttacatcggttgagttagcacctaacaatactaagaggagcgtgacgagaacatacaacggtgtggaacagagaccaagactcgtt

SEQ ID NO: 1836 - DNA, 161 bp, Gossypium hirsutum
  Clone ID: LIB3493-047-P1-M1-H7
cggacgcgtgggcggacgcgtgggctcttattggataaataaagaagagaagtggggcaaagatgatgcagctgagtattaagagggttcctactgttgtttcgaattataaaaggatgaggtcggaaagagactcgctcagccggagctggtggatgtgg

SEQ ID NO: 1837 - DNA, 360 bp, Gossypium hirsutum
  Clone ID: LIB3493-047-P1-M1-H8
agcaaataaaactttgaattattcacacgaaacaatgaaaacccacttttttcggctggtttttctcctcattgtttccttagcccaaggtctgaaccccaaatgtgacatccaaccatggctcaaacctgcaagtgttccatgtttacagtccatgctgacgcttcaaaccctcaaaaccactctcatgggaagaagatgtactacaaacgcttgccaaagaccaaaccaaggtgccatttttggccaacctcgtggctaaaaaatttggggtgcctattacttcaagcaggcagattgtgccaagttcaacttacattgtgaaggccaatattggaaccccaccttaaaccatgctta

SEQ ID NO: 1838 - DNA, 184 bp, Gossypium hirsutum
  Clone ID: LIB3493-047-P1-M1-H9
atactgaaacaggagtgcaaacattattcaccatgaataatctgtacagtacataacaaaactacctgtgtcacatcttgcatatgtcatatatacttcggactatctagatatactaaaacgcgctatggaattcacccacttaataatcttgcttaaaaaacccctcacaaatgtttgcctt

SEQ ID NO: 1839 - DNA, 425 bp, Gossypium hirsutum
  Clone ID: LIB3493-052-P1-M1-A10
ctcttccaaacgcagccaacattttaacctgaattcacagccctgaaatcagaatgggtagggttcattccagcaaccgccggaccatcatttatttggtggtcgacaatacacgagcagcgactagattccaccgatgaaggcaccgctcaaggaaatctgtatttcagagatatttgggatttcattggcgacgtttcaaggattgatggatgacacttttggatactccttccaatttcgatctcaacgaagtgaacagaggtcaatggccgatttgcaagactcggccgtacgaagaagcggggagacgtgcgaaggaggccatgctaggagccgctcgttggagcccaactctctggtatattccagaagcttctggtgctctcgaccgctaaacttctttttgggttccgaatttcagc

SEQ ID NO: 1840 - DNA, 407 bp, Gossypium hirsutum
  unsure (1)..(407): unsure at all n locations; Clone ID: LIB3493-052-P1-M1-A12
cggacgcgtgggatttcagattattgggaaatcaatggaggcagaggtgataaaagcagagttggtattgccaacgcatatgagtttcaagaggattcaaatgtatgnagaaatacccaaagggccaatcgaaagtgagatggaaacagctcaagcaaatccttcaagctgaaatttgccagaattactctcctgatgaacccaattatgttaatatcgaatcaccgccttcaatgcaaccgtgcaaaagaatttgtgatataacgggattcgaggcaccgtaccacgatccgaggacgaatctccgctatgcaaatgccgatgttttcaagcttgtgagatcacttcccaatgagtatgtgcaaaggtatctagctctaaggaaagcgggagtggttttgaggtga

SEQ ID NO: 1841 - DNA, 324 bp, Gossypium hirsutum
  unsure (1)..(324): unsure at all n locations; Clone ID: LIB3493-052-P1-M1-A3
aagctatttcaataccacaagttgataatgctgtgagatattctggtgctgagtgctcttctgaggggaagaacgattntattgaggactatntcaataaaaatgtttgctgatttgacagttcatgaggcttgtaggtcatacatgcgttgcaattgcatggttgaccaacctttttgtggagaacgagaagtagctctagtattgagcagtgaggagaagttatatgtgctgcttgttggcgtcacatttgatggatcagagagtatcttggatttattaggttcccatagggttgaagatataagagaggttttagttggt

SEQ ID NO: 1842 - DNA, 313 bp, Gossypium hirsutum
  Clone ID: LIB3493-052-P1-M1-A4
aagagatcttatcaacatcctggaagatgccattaggagcggatccccaattttggtaattgctgaagacaatgaacaggagctttacactttgtggaacaacttaaggtgcttgaagattgttgttaaaagtcccgttcggaacgcagagtagtattggatgacattgtatcttactgagactgtataggatgagtgggcttctggacaagctagcaagaagtttggggatgccttaaaggggctaccaggtacaccaccatgggggatggagccccagagcatgaataacgatgacagattaaaaatctat

SEQ ID NO: 1843 - DNA, 466 bp, Gossypium hirsutum
  unsure (1)..(466): unsure at all n locations; Clone ID: LIB3493-052-P1-M1-A6
aaaggcaccaaattgtttataatcacatgtattaactttttttgtgtttgtaggaagaagagaagaatatgaagagggtttcctttgtcatgatcttggtgcgngtggcggtgttttcaggtgaaacacgcacggtggaagcagtgacatgcnatcccatcgagctcataccatgcttgccggcaatctcaacaccggcaaagcctacatccgccgcttgttgcanaaaggtgaaggaacagctactatgcttttgtggctaccttaaggacccaggtgctaagcccttcatcgacaatcccaatattccaaaggtggctagctcttgtggagttgcgcatgcatttcctcctaagtgttaaaatgttgctttcattagagcattctcgctcaaggactagtatgaataaattaataattaaatggaaatttatctaataatttaacccattggccaaataatttt

SEQ ID NO: 1844 - DNA, 253 bp, Gossypium hirsutum
  unsure (1)..(253): unsure at all n locations; Clone ID: LIB3493-052-P1-M1-A8
ggccggcctggtggtgttagcaatggtatggggcctggccagcctggtggtgctagcaatggtatggggcctggccggcctggtcntacttcaatggtaccgggcctagccgacctggtggtgtaagcaatggtactgggcctggtcagcctggtggtgctaacagctgttctagatctggccgggctggtgctgctagcaatggtgcaaggactggccagcctgttggctcaagcaatggtgcagggtatgg

SEQ ID NO: 1845 - DNA, 415 bp, Gossypium hirsutum
  Clone ID: LIB3493-052-P1-M1-B10
aggaggttgagaaacaggcagcaaaggcagaggcagctgaggaggaggaggcgccgagacccaaaccaaagaatcctcttgatttgctgcctccaataagatggtactggatgactggaagaggctttactctaacacaaagaccaatttccgagaggttgcaattaaaggattctgggacatgtatgatcccgagggatactcactgtggttttgtgactacaagtacaatgaggagaatacagtttcatttgtcacaatgaacaaagttggaggattcctgcagagaatggatttggcccgcaagtatgcatttgggaagatgttggtgatcggtgctaacccttcattcaaggtgaaaggactatggcttttccgtgggcaagagattccttaatttgtgattgaccagtgc

SEQ ID NO: 1846 - DNA, 356 bp, Gossypium hirsutum
  unsure (1)..(356): unsure at all n locations; Clone ID: LIB3493-052-P1-M1-B11
gggggattcggtcacccacctccatgaggttgagaaacaggcgcaaatgcanancagcttanannagancgacgcgatgtccaacgggggagagggggtccattctctcctccaagtaaaatggtactggatgactggaagaggctttactctaacacaaagaccaatttccgagagggggcgagtaaaggattctggtacatgtatgatcccgagggatactcactgtggttttgtgactacaagtacaatgaggagaatacagttgtatttgtcacaatgaacaaggttgaaggattcctgcagagaatggatttggcccgcaaggaatccatttggaaagatgtatgtttatc

SEQ ID NO: 1847 - DNA, 461 bp, Gossypium hirsutum
  unsure (1)..(461): unsure at all n locations; Clone ID: LIB3493-052-P1-M1-B12
catcattctgttttctctttctttcttgtcactgtcttttggagctaaacggtagtgaaaggcccaatcccagagggaaaggggaaaaccaaattaaacaaaaactaatttctcttacattttatttttttattttataattttataatttattaattttctctgactgaagctactaatatgagtagagcgctcctctcatgccactaccggttatgaatcccaacgtggagccaccacttcctgggttagcaccggcggcacaaccgcctcagcctcaccgtccttctacctcctgtgaccgccatccttaagagcattttactggcttttgcccctcatgcctctacgaacgtttcgctggtctcgagccttcgncttcttttgcttcttcttcttctcggaaaccctccattcgcgccagtacttaaaaccccaccgttgcacttaaagccattttc

SEQ ID NO: 1848 - DNA, 360 bp, Gossypium hirsutum
  unsure (1)..(360): unsure at all n locations; Clone ID: LIB3493-052-P1-M1-B2
tgacgcctcgtcggccggatcgtcacccacctcgtactttttatgcatgcttattctcgcatccatctggtggggtattgcctgcaagacacaaaccctaagcccatacatcctccatgtaatcccatcaacctctccatctaaacccctggacgtcctccgtgacggtggttctccatattactaagcaccaagtggaacctgcccgtcgccacttgccccattgacacattgaaattgngtgcatgtgtggatctgcttggaggtttgtttcacaattggcccttggtgacccacttgtgaatgcatgttgtccagtccttgcggngcttgttgagcttgaagctgctgtttgcttgt

SEQ ID NO: 1849 - DNA, 165 bp, Gossypium hirsutum
  unsure (1)..(165): unsure at all n locations; Clone ID: LIB3493-052-P1-M1-B4
ctttctttgttttttcttttttacaaatggatgcttcacagaaaactattcttgtggctggagtgctgggttcatgggcactcacacattggtacaactactctaatgaatggttntataagtgtcacattattngacaaatctntggataactctggttattga

SEQ ID NO: 1850 - DNA, 126 bp, Gossypium hirsutum
  unsure (1)..(126): unsure at all n locations; Clone ID: LIB3493-052-P1-M1-B5
ccaacacttgctacaacaggtttcaccctccaaagaggtgaaaccaaaaccattacggccggcacatcatggggcggtcgcttttgggctanaaccattgttcgcaagattccaactgaaaattct

SEQ ID NO: 1851 - DNA, 447 bp, Gossypium hirsutum
  Clone ID: LIB3493-052-P1-M1-B6
aaagagatgatatctactctccctaaaaagaattgttggggtattcctgaagctcgatatcaatatcagggtttttggctcacccccccttttctacaagagcattatcggctcaacaacaattccaggctcaacccactgatatcatcctttgtagctctccaagaacaggtgcagcctggttaaaatccctcactttcgccactattacaagaacttcatacaatgattccaccacccctttactttccaagatgcctcatgatgttgtgcctttcatggagttcgatcatgcccagttttccactaatcgacatcttgaaattcctcttttagccactcatcttccttattccttcttacccagatctataattgattctggttgtaaacttatttacatttgcagggaccccaaagatacatttgtttcattgcatcatttca

SEQ ID NO: 1852 - DNA, 251 bp, Gossypium hirsutum
  Clone ID: LIB3493-052-P1-M1-B7
ctaggatcatgtaatcatatatatattaaaaagctttttttaccaacatggtttgggttttaatgtaatatatgggaaaaaataaaacccttttccttagggaaggaatatggtttaatcaactacctacttgtttttgaatcatatggtaatttggtagctttggattgaaagttttggttatgctattttatattaagatttagttggtgagtgtgcatgattggttgtttttagcacagtgctttttc

SEQ ID NO: 1853 - DNA, 342 bp, Gossypium hirsutum
  unsure (1)..(342): unsure at all n locations; Clone ID: LIB3493-052-P1-M1-C10
cttttcagtcctaacaaaaggcggcccctcaactctcttctctctttcccgttcagtgtttcaactcaaaaaaatggcggaggaaaagaaggctcaatcttgttgggtttggcctaacggtaaaccttttgtcaatggtggtgcctctggtatgcttgctacctgtgtcatccaacccatcgatatgatcaaagtaagaatccaactgggtcaaagatcggcagcaactgttaccaaaaacatgcttaaggaggagggtgttggtgccttttacaaaggtctatcaacaggactgctcangcaagctacatacactactgctcgattgggatcattcaaaat

SEQ ID NO: 1854 - DNA, 430 bp, Gossypium hirsutum
  Clone ID: LIB3493-052-P1-M1-C11
cactaattctatcttctccaagtcaaagtttcaaagttaactcttgccttggtagagaatggattttcttggaatttttcttttggcttctcttgcctgttgaaaaacattcattggcatgggaggggcttggctaacgctcacgctacattctatgggagcagtgatgcgtctggtacaatgggtggagcatgtggctattgaaatctttatagccaaagctatggcacaagcactgctgcattgagcactgctctattcaacaaaaggctcgcttgtggggcatgctttgagatcaagtgtgttaatgacaatagatggtgtctcccacgctccattatagtaacaagcacaaacttttgcccaccaaacaacgctctcccgaataatgcaagcggatggggtaaccctcctttacgacactttgatc

SEQ ID NO: 1855 - DNA, 349 bp, Gossypium hirsutum
  unsure (1)..(349): unsure at all n locations; Clone ID: LIB3493-052-P1-M1-C12
ccaacacttgctacaacaggtttcaccctccaaagaggtgaaaccaaagcgattaccgcccccacatcatggggcggtcgcttttggggtnaacccattgttcgcaagattccgacggaaaattctcatgtctcaccggtgattgtggctccgggaagcttgaatgttctgggaatggggctgctccgcctgccactttggctgaatttactttggacggtgctggtgggcttgatttctttgatgtgagtttggtggacgggtacaacattcctatgttagtggttgctcagggtggcaaaggtcaaaattgtagcagcaccggctgcgtttaggatctcaatggctt

SEQ ID NO: 1856 - DNA, 305 bp, Gossypium hirsutum
  Clone ID: LIB3493-052-P1-M1-C4
gtcaaccaattgtttgagctagctagctcttactcaaatggcaaccaaaacgatgaggtgtgcaaatattttcacttttcttctttttgttcagtgtatgcaactccattttccttggtgctaatggagatgacaatggtggttggcaaactgcccatgccaccttctacggtggtgctgatgctaccggcacaatggggggagcttgtggttatggaaacctgtacagtcaagggtatggaacgagcacagcagctttgagcactgcacttttcaacaatggcttgagctgcggtgcctgctac

SEQ ID NO: 1857 - DNA, 380 bp, Gossypium hirsutum
  Clone ID: LIB3493-052-P1-M1-C5
acgaacatagcacacaccagccttttgattagcctctttctatttgtcaaaaatggcaacgtcagcagtttctgcaacttttctgcttttcgtttttgtttttgcttgcgaggcgcctttggtgattatgtgggaggatggcaaggtggccatgctacattgtatggcggcggtgatgcatcttccacaatgggaggcgctcgttgatatagtaacttatatagccaaggttatgggaccaacactgcagcacttagcactgctttgttcaacaatggcctctagtgcgggtcttgctattaaaagaggtgttacaccaaccctcaatggtgcctgtctggatccaataccgccattgcaccaacttcttgccccctaac

SEQ ID NO: 1858 - DNA, 429 bp, Gossypium hirsutum
  Clone ID: LIB3493-052-P1-M1-C6
catggttccggtttatgccttgatgtctttcttgtcccttgttctaccacggagtgcaatgtatttcaattccatgcgggaaggctatgaagcttgggtatttataattttctttctctctgcttggcatgggttggaggtccaagagcagttgtgctcagcttgagtggtcgagttttaaagccatcttggtatctgatgacatgctgcttgcctcctatgcctttagatgggcgatttatactgagatgcaagcaaggctgtctgcagtttgtcatcctgaagcccattttagtcgctgttacactcgtattatacgccaaaggaaaatataaagatgggaattttagtccaagtcaagcatatctatatcttactatcatctatacaatctcttacaccgtagctctgtatgctttggtgttggtt

SEQ ID NO: 1859 - DNA, 339 bp, Gossypium hirsutum
  unsure (1)..(339): unsure at all n locations; Clone ID: LIB3493-052-P1-M1-C7
gcaattcataaggtagctgcagctcatgattgcaaaattgttgaaggtgtgcttaggcatctactgaagcattttgtgatagacggtaacaaatcatactaagcgtctccaatccagatacaagagttgatgatgcagagtttgaggagaatgaagtttatgctgtagatatagttgcaagcactggtgaaggcaagccaaagttattggatgagaagcagacaactatttataagagagctgtcgacaagaactatcatttaaagatgaaggcctctagatntattttcagcgagataaatcaaagattccccatcctgccattcaccggtcgcgcct

SEQ ID NO: 1860 - DNA, 340 bp, Gossypium hirsutum
  Clone ID: LIB3493-052-P1-M1-C8
aaccaaactacgagcctatcttggtgatgaaaaagcgaatgaggtcatgtggcgagggcttatatattataagcgtagggaccaatgatttctataaactactataactttcctcaaaggagggcccaattcaccattccaaaatatgaggatttcctcatcggcaatgctgaggatttcattaggaaaatttacagtctgggagctcggaagttgtccctgaccggactcccaccgatggggtgtttgccactgcaaagaacattgaacctaaaaaaccctcatagctgctcggaggaactcaataaagttgctttgaagttcaatgaaaagttaaaag

SEQ ID NO: 1861 - DNA, 137 bp, Gossypium hirsutum
  Clone ID: LIB3493-052-P1-M1-C9
gatcctttggattctacatctcgtatgctctcttcctcatattttgggtgaggagcgctacaacaacttgttcgtggggtccaaaaggttcttccaaacttcaaaaacttgcaggatataattgctattttggggat

SEQ ID NO: 1862 - DNA, 470 bp, Gossypium hirsutum
  unsure (1)..(470): unsure at all n locations; Clone ID: LIB3493-052-P1-M1-D1
tttgcgttgagatcgggaagcatgccctattttagtgaagatgcaactcatttgcctgacgtaaacgacactgaaattctgaatgttttaaaggactaatggctgcaagttggaatgagcttccctattcggttgtacaagatgcaaagaaagccttatcgaaaaatactgatgccaaagccggtcaggaagctttgagaaatggtttccgtcccgctgaagctgttgaagagtttggtggtattctaatcaccatgaaaatggactcgatgacagcatcggagtgagcggagagaatgtaaaaccttatcaagcgagnttgctgctgcacttaagacagtgttccaacgatacgcgacttacttggatgcattcngtcctaacgaaacctacttgcgaaagaaagtagagaatgagtngngatcaaagatgatctacctaaagatgagatggtatggcctaagttctga

SEQ ID NO: 1863 - DNA, 426 bp, Gossypium hirsutum
  Clone ID: LIB3493-052-P1-M1-D10
ctctcttctttcctcctagcccaaaaaaaaaaaaccctctttcctttctcgcggtggttttaccgttcaatgatgtcttgcttcattagcaaatatgccgatgagttggctaaaaacgctgcttatattggaacccctggaaagggtatccttgctgctgatgaatccactggcaccatcggcaagcgtctttcaagcattaatgtagagaatgttgaagataacaggcgtgctctccgtgagctcctattcacaactccaggagctcttcagtacctcagtggtgttattctctttgaggaaaccctttatcaaaaaaccgcttcaggcaagcccttcgttgatgttttgaaggaaggtggtgtcctccctggcatcaaagtcgacaagggtaccgttgagcttaaccgaaccaatggcgaaact

SEQ ID NO: 1864 - DNA, 441 bp, Gossypium hirsutum
  Clone ID: LIB3493-052-P1-M1-D11
cacgaaagcttgcgagagagagaaaaaatggatccacagctaactgaagtgtcggagatgttcgagcgattcaaagctgcattcattagaaaagatttcgattcatgcgccaatctcctttctcaactcaaggttttgctgacaaagtttaggagccttcctccgctatttgaaaacacccctaattcggttaacgaagtgctcttagcaagggaaatttacgaacatgctgttgtcctcagtgttaagattgaggatcaagatgcctttgagagggactttttccagttgaagccctattatacggatgctggtagccgtcttccaccatcccagcaagagtacctgattctaggtcttaatctcttgagacttcttgtccagaacagaattgctgagttccataccgaactggaactgctttcggccactggcctggag

SEQ ID NO: 1865 - DNA, 345 bp, Gossypium hirsutum
  unsure (1)..(345): unsure at all n locations; Clone ID: LIB3493-052-P1-M1-D12
cggacgcgtgggaaaaaagagagatggcgtctgtaataaaatctgcaatcgtaattgtgtcggtgtttttatctgtacgcttcanttcgggtgttaggttgctccaggaacagcccaatgatgaccccaaaaacatggacgctattcctcccattgatgcactcaaccctaccgagttgaatggacccggtgttggcattcacgaagatcatgttgtcccaaaaggtgctgaaattggtactcttggttttggttttgaaggtggtcctgataaatgttgttcttctggatgttccggtaattgtaatcctggtggtttcgttctaccatttccccaaatggcag

SEQ ID NO: 1866 - DNA, 230 bp, Gossypium hirsutum
  Clone ID: LIB3493-052-P1-M1-D2
ccagtttcaagctttctaattaccttccttccattcttctgtaagttaattagtggtgggtgggaaaaaaatgggaccaggtgggccaggagggcaccggggccaggtggaccaggggggcctccagggccaggaggaccaggagggcctccaggatggggcggtcctgcacccggaccaggagggccaccgggatggggcggtcttcacccgaccagagggcaccgggt

SEQ ID NO: 1867 - DNA, 428 bp, Gossypium hirsutum
  Clone ID: LIB3493-052-P1-M1-D3
cgtgaatggagccttcgaactttaatgggccggaaactggcatgtttgccaaccggcgggggaaactgttctacggggaggaactctacggccgatacctaaacttaacgctccgacagaatctaatgaaccatccgaagctgccggtacggcggacatgtggaagttgcaagaaacagcgacaagtctgaactccaactgtcgtttttcacttcaagatctaaagttcatcacataagcgtagaaccatcggtgagttgaagaaactacaatcgtccgatctagatctttgtttgactccaagctttaaaggaaaccgagtgctggataatagaccggcccgggactccgtctatgatctcggatgaatctgtcacgactgcgacgtgcacctgaagtgggttggcaggtcaagggaaggtactaaa

SEQ ID NO: 1868 - DNA, 428 bp, Gossypium hirsutum
  unsure (1)..(428): unsure at all n locations; Clone ID: LIB3493-052-P1-M1-D4
cggacgcgtgggaaaaagaaggcattggcaagcgataacgagccagcgaagctactgtgagcgcgtaccttcaacgagccgatgagcttcaaaaacatgacctctccttgcttattactgtcgtttatatgcaatggaaaaaggattgaggatacctcanaatgaaagaaccaaaaccaccaattctcttcttgtttctctcatgaagcaacttgaaaaggataagaaaacgctgaagttgggacctgaagatcatttacatctagagggctttgcattgaatgtctttggaaaggcagacaaacaagatcgtgctggacgagcagacctgaatactgcaaagacattttacgctgccagcattttcttcgagattataaaccagttccgtgaacttcagcctgatcttgagcagaaacagaagtatg

SEQ ID NO: 1869 - DNA, 51 bp, Gossypium hirsutum
  Clone ID: LIB3493-052-P1-M1-D5
atcgacttggtcgccggcggcaagagcaagaagacgaagagaactgctccc

SEQ ID NO: 1870 - DNA, 415 bp, Gossypium hirsutum
  unsure (1)..(415): unsure at all n locations; Clone ID: LIB3493-052-P1-M1-D8
cccacgcgtncgcaaggctggcattgcattaaatgacaattttgttaaggttggcgcgtggtacgataacgaatggggttacagttctcgtgtgatcgacttgatccggcacatggcttctgcctaagtgagtgattttggtgaaccaaactcatttcataatggactttttaataatagcctcgttcttcagctttagcaaaatatagaagagatgctatgggaataataatagaaattgctcgggattctgggagtttctaattttacattgtaattgtgttctgtctgaaacacttgtaatatatataattacaaggaaccaaacaaacaaggcaaggctaaggtaaacttgggaacaagagctaaacattctatttagcatcaaaacttaaagaatttaatttacttgttt

SEQ ID NO: 1871 - DNA, 457 bp, Gossypium hirsutum
  unsure (1)..(457): unsure at all n locations; Clone ID: LIB3493-052-P1-M1-D9
attggtactcttggttttggttttgaaggtggtcctgaaaaatgttgttcttctggatgttccggtaattgtaatcctggtggtttcgttctaccatttcctcaaattccagaaatcccaagaattccacagatcccacagatcccacaaatcccacaaattccactaatcccacagatcccacaagtcccacaaatcccactaatgccaggacagtcgggatgtgagagtggggagtgttaccgtcagggttgcggtgggacttgtgctgagtgtggtcagcccaggtgcgcatcangatgttgccaggctgaaactgtaaagagcaaagggatagaagaggttatggacagtgaacccagtccaccaaagtagggagatgataccatattaagatgaaataatgaggaagagttggttgtcgtccttttaatatacaaaataagaagtaatgatg

SEQ ID NO: 1872 - DNA, 142 bp, Gossypium hirsutum
  unsure (1)..(142): unsure at all n locations; Clone ID: LIB3493-052-P1-M1-E1
tttaaaaaaaaaaaannaaatcctttttcgttttttttgaaacggaaggaaggaaaggaatttaaggaaaaaaaaatattgattcttctcttttttgcctgacatcgtcacattataacttttctagatttaggtttttatt

SEQ ID NO: 1873 - DNA, 434 bp, Gossypium hirsutum
  unsure (1)..(434): unsure at all n locations; Clone ID: LIB3493-052-P1-M1-E10
tgctccaacactaacccatgctagccaacacctcttgttcctcaattcccgcttgagagccaatcccatgctttgaaaatggtgataataacaacaatnaagagaaanaagaagactctgctaggaacactctagatcctagatgctgaagtggtttcactttcaccgaaaacactactagaatcagatcgttacgtttgtgagatctgtaaccaagggttccaacgagatcaaaacctacagatgcaccggcgacgacataaggttccatggaagttgctgaaaagagaaacaccggcggtgaagaaaagggtgttcgtttgtcccgagccgagctgtctccaccatcaaccttgccatgctttaggcgatctggttgggatcaagaaacactttaggaggaaacacagtaaccataaacaatgggtgtgtga

SEQ ID NO: 1874 - DNA, 451 bp, Gossypium hirsutum
  unsure (1)..(451): unsure at all n locations; Clone ID: LIB3493-052-P1-M1-E11
gcaaattagggtttggggtgctgatgctcaaagaagactaagcaaatctcacatgctagtctgtggaatgaaaggaactgttgctgagttttgcaagaaacattgtactggcaangagttggtaagtgtgacatttggtggatgatcnggatcgttactcgatgaagtctntatctgtgaaattttttgatatttgcctcatgaaaatcactacaacgggaaaactctggccgaggtttgctgtgattctttgaaagaattcaaccacatggttcatgttgctgtggaaacaggcgatatatcaacatttggtgtcgagttctttgaaaagtttgatgctgtgatcatcagttgttgctctcttggaaaaaagaaatngatcaatcaaaagtgtcggaaattatcaaagcgtgtagcattttatacaattgagtgtagaggctcatgtggt

SEQ ID NO: 1875 - DNA, 434 bp, Gossypium hirsutum
  unsure (1)..(434): unsure at all n locations; Clone ID: LIB3493-052-P1-M1-E12
caagtcgcggcgcctcccccaacttcacaccagcaaagcaaaagcttcaccaatggggatcgatttagtcgcaggaggtaagagcaagaagacaagaggacagccctcaaatccgatgatatttacctcaaactcctcgtcaagctttacccgttccttgtaagaagaactgggagcaaattcaatgctgtgatattgaaacgcttgtttatgagcaaagttaacaagcctncactatctctctctaggcttattgaattcatgaagggaaaggaggataagattgctgtggtagtggggacagtgacagatgatattaaggtttatgaggttcctgctttgaacgttactgctcttaggtttactgagactgctagagctaggattgagaaagctggtggagaatgcttgacttttgatcaacttgctttgag

SEQ ID NO: 1876 - DNA, 96 bp, Gossypium hirsutum
  Clone ID: LIB3493-052-P1-M1-E2
actctttttcgctactccttaaaccctaacccctcacttcttcacatcgttcccgtcattggcacttttccttcgcttccttctgtcctttccaga

SEQ ID NO: 1877 - DNA, 145 bp, Gossypium hirsutum
  Clone ID: LIB3493-052-P1-M1-E3
ccaaaaaaaaaaatggattaccgcattgtttttccaatttttgggagttttgcctttttaatcgtgggcgggatttgtccggaaacttctcggcggagggatttgaagttgatccgttgttcgaccaagtaacggacggtcacaa

SEQ ID NO: 1878 - DNA, 414 bp, Gossypium hirsutum
  unsure (1)..(414): unsure at all n locations; Clone ID: LIB3493-052-P1-M1-E4
cattttcagatccaactcattactctcttcaaaggaccaaaaagaagatggcttcggcattgagcggcnatgaaactgctcctttcttcngcttccttgggctgctgctgccctcgttttctcttgtatgggagcagcttatggtacagcgaanagtggtgttggtgtagcatcaatgggtgtaatgagaccggagctggtgatgaaatcgatcgtcccggtggtaatggctggggtgctgggtatntatgggttaatcatcgctgttataatcagtactgggattaacccaaaggctaaatcttattaccttttcgatgggtatgctcatttatcttctgggttagcttgtggacttgctggtctttctgctggtatggctattggaattgtaggtgatgctggtgttagagc

SEQ ID NO: 1879 - DNA, 448 bp, Gossypium hirsutum
  unsure (1)..(448): unsure at all n locations; Clone ID: LIB3493-052-P1-M1-E5
agaacataaaaagaaagaaatgacaaaaacttctctgatcatccttgtttctttggctatgggcattttgtcttcactcaatttggcttatggagcccatccgatcaaaacaagttcaccgtcgtaggtcttgtttattgtgatacttgtcgtgttgaatttcagactagcataagcgaacctatttctggtgcaacagtaaaattggaatgtangaatcgaaccagtgaaaaaattactttcaaagcccagaaataacaactgatgctgcgggaagctacaaaattaagtgacaggagattatgaagactcagactgtgatgtcaacttggtgaagagtccccgagcggattgtaatgatcccacagaagcgtggaggaaagccagggtggaactcaccgcattggatggtgttaccggccccaattcgctttgccaacaatcttgg

SEQ ID NO: 1880 - DNA, 466 bp, Gossypium hirsutum
  Clone ID: LIB3493-052-P1-M1-E6
cggacgcgtgggcggcggagcttttgttgtcgaggttggagaggggtgattacgggctggatgctcctgtgtagactcaggatcacttatttaacatatccgatcaaaacatgttcaccgtcgtaggtcttgaatattgtgatacttggcttgttgaatttcagactagcataatcaaacctatttcttgtgctacagtaaaataggaatgtaggaatcgaaccactgaaaaaattacttttcatagcccagaaataacaactgatgctgctggaagctacaaaattgaagtgacatgagattatgaagactcatactgtgatatcaacttggcgaagagtcccagagcggattgtaatgatccaacagaatcgtggaagaaagccagtgtggaactcaccgaattggatggtgttacccgcccaaattcgttttgccaacaaatctttgtgtttaaaaaagaaag

SEQ ID NO: 1881 - DNA, 518 bp, Gossypium hirsutum
  unsure (1)..(518): unsure at all n locations; Clone ID: LIB3493-052-P1-M1-E7
aattgagggaccatgcagattctaacattgtcatcatgatggctggaaagaaaggcgacttgaatcatctcagagctgttactcgaggaggatggtcaagctctggctgaggagggaagggtctttcatttctttggagacatcagcgctggaagcaaccaacattgagaaggcattccaaactatattgactgagatctaccatatcataagcaaaaaggcattggcagcccaggaagcagctgctagtaccgcaattcccggccaaggaactaccattaatgtcactgatacatcangaaacactaagagaggatgctgttctacttagaaaggtaataggttacatttgatgctgttctacttaaaaaggtgataggttacatttgagaaggtaaaaaatatttgctaggaagtaggcccttttcatgtttttgtcaatttttggctgagagaggagacatgtaaatacatatatataatttacttgaaatgtgatatgaagcttgtgatgtttt

SEQ ID NO: 1882 - DNA, 281 bp, Gossypium hirsutum
  Clone ID: LIB3493-052-P1-M1-E8
aaaaatctctctttttcttcttcattttccaacatcaccttctcacgcgcgggcggcgcctactcttccgccggcgggaaatatccattcccttttctttcccttccctctcctcccttttattaaaaaaaaagaaggaaaaaaggtcacctaaacaaaacaaagtttgcttctttaggaaaggttttttcaaaagcacttgagattttaccatatcatttactatcacaattattttactcgttagggtttgtttgattaataacaagaggagagggaag

SEQ ID NO: 1883 - DNA, 267 bp, Gossypium hirsutum
  Clone ID: LIB3493-052-P1-M1-E9
aatctggtgacatcaaaagtgggttcaatggagttccagttttccaggctgaccggcttgttttaaggaaaaaaaccaacctttcctgcccatttatttcattaaggaagattttgaaaaagacctttcaaaggtttcaaggccttcaaaaggacctggtgtttttaaccaaatcatggttggaagtttggaaaacgttctgaagaaaatggaaatgaccgagaaaaattcgggttgggaagatctaatattcattccacccggtaa

SEQ ID NO: 1884 - DNA, 403 bp, Gossypium hirsutum
  unsure (1)..(403): unsure at all n locations; Clone ID: LIB3493-052-P1-M1-F1
gagctgaattattgaattccctcccttgaaagcgatcatggatctagcgccggaggagctgcagttcttgtcgttgaaagatatcctgagggaatccgttgcaatccccaaaagatcccccaaaaccttctatcttataaccttagctctcattttccctctctcttttgcctttttagctcactcgcttttcacccatcctatcttaaatcaactcgcttccgatccgctggcagacccgtcccagacccgccacgagtggactctnctctttaaccttcagttctngtacctaattttcctctttgccttctctcttntatctacggctgcagttgtatttacgggtgcatctctctacacgtcgaagccagtctctttcacttcaacgatctcagccata

SEQ ID NO: 1885 - DNA, 388 bp, Gossypium hirsutum
  Clone ID: LIB3493-052-P1-M1-F10
gttctcaactaaacttataacgttcgatcgtttaacgcaaacccattttgaagtgagggaaaggtttcagttcagagtcataagcaacatcaatggctccttcaactctgacggctcttgcggaagagaaaaccttgcaggcaagcttcgttcgtgatgaagatgagcgtcctaaggttgcttacaaccaattcagtaatgatatccctgtcatctctcttgctggtatcgatgatgttgatggcaagaggggtgagatatgcaagaagattgttgaggcttgtgaggattggggtgtcttccaggttgtggatcatggtgttgatactaaactcgtgttcgaaatgacccgtcttgcgagagagtattttgcttttcctgctgaaga

SEQ ID NO: 1886 - DNA, 428 bp, Gossypium hirsutum
  Clone ID: LIB3493-052-P1-M1-F11
ctggaaggtatcacacattgctaattaggaattcatcagtgtactcttgtggttgcagtttgtgtggtgtccttggacatggtcctgaaacaacacagtgtgtagcatttacgaggattaacttcccttctctagctaatgtgatccaggtgtcggcctctcagaatcatgctgcatttgttttgcagtctggagaggttttcacatgtggagacaattcatccttttgttgtggccatagagatacaggccgccccatctttagaccaaggcttgttgaagcaatgaaggggattccttgtaaacaggttgctgctggactgaattttactgtgtttcttacaagacaagggcttgtttatacatgtggaactaacacacatgggcagttgggtcatggtgacactcaagaccgaccaacccccaaa

SEQ ID NO: 1887 - DNA, 369 bp, Gossypium hirsutum
  Clone ID: LIB3493-052-P1-M1-F12
cggacgcgtgggaaacactatcactgtctgctcgcctctgtttattttgtctgggttgcaacttgcgcataaaagctttggcctttcgctttgctttggttattttcattctttggtggttaataataaagaaaaaaaaaaggaaaaaaagaagggatttaagaaagtgaaatcctcttgtttatggtttttaaggtgggtttcgcttcaaattttgatttgattaagaataaattgaaaggaaaaaaaaatggagagagattttctgggtttgaactcaaaacaatccttccctttggttaaagaagaagttgaagaaattgggtttaccaaaagcttggggattcaatggccaatttcaaacaaggt

SEQ ID NO: 1888 - DNA, 431 bp, Gossypium hirsutum
  unsure (1)..(431): unsure at all n locations; Clone ID: LIB3493-052-P1-M1-F2
agaaagatgatcaaaatgggttttattgttttggccttgatggtggtttccgccgcgacggtggttacggcggctgacaagagtgggttaccgaatagtgcaccaaaaatttccggagcgtgatgactggcttaagctttgctcaaggaaaagcagcgtcgccgtcaaaggagtgctgtaattcagtggcggggattaaagagaataaacncaaatgtttgtgttatatttttgcaacaaacacaaacctnncgtgctcaaaatctcaaaagcttanngtgtcaagaagataagctgtttcagttaccatcggcttgtcaattgaagaacgctagcgtcagtgattgcccaaagcttcttgggttatcttcgagctcaccagacgccgncatcttcaccaactcctcctctaaagcaacgacacccaatac

SEQ ID NO: 1889 - DNA, 246 bp, Gossypium hirsutum
  unsure (1)..(246): unsure at all n locations; Clone ID: LIB3493-052-P1-M1-F3
cccacgcgtacgcggacgcgtgggcttttggcttcagcttatggaagtactgctggtgccagtgcatctagagcatggctgttaggaatttttgctcttcagtggcagctttacatgcttcaggagcatgagngttcatgctgcagagatggagcgcaccttcattgctatcaagccagatggagtgcaaagagggctgatttcggagatcatctctcgttttgagcgcaaagggttcaagcttgt

SEQ ID NO: 1890 - DNA, 402 bp, Gossypium hirsutum
  Clone ID: LIB3493-052-P1-M1-F4
gttaaaccgtacaaggagaaaggcaaagttcatgagaagaagcaacaacaattggagagaggagagtattccgcaactccagttgatacccgggaacattgatcttcaactcggtacgagaatgttttataatgctcaagagatgatgttgcgaaggaaactcgaggagcaggccgatttacaacaggccatcgaactacaaggaagaaggttaatgaatttgcagcttttggacctcaaaaaccaacaccattcttcgtttcatcacagtttgtccacctgttctcccattccttcgccgactgtttcccatattcccaccaatcaggctcgtattttcccagttgaagcaaccctagaagataatggtggtttgaaatcaccagctgccaataagctgct

SEQ ID NO: 1891 - DNA, 407 bp, Gossypium hirsutum
  unsure (1)..(407): unsure at all n locations; Clone ID: LIB3493-052-P1-M1-F5
gttttgaatctagggatttgcgggtggagaagacgagagctcatctctctgctgggaaggtcctgtccaggtagaattctcttcttcctttgcgttgtgtctttgttgttcagtcgccatggcttcaaagcggattttgaaggaactcaaggatttgcagaaagatccacccacttcttgcagtgctggtccagtagctgaagacatgtttcattggcaagcaacaatcatgggaccctcagatagcccttatgctggaggtgtgtttttagttaccatccatntccctccagattatcctntcaagcctnctaaggtcacgtttaggaccaaagtcttccatcctaacatcaaacagcatggaagcatttgtcttgatatcctcaaagaacaatggagccctgcac

SEQ ID NO: 1892 - DNA, 428 bp, Gossypium hirsutum
  unsure (1)..(428): unsure at all n locations; Clone ID: LIB3493-052-P1-M1-F6
cccaaggtgtcctgaagcctggtgctcatgctgctgatggatgggttactgaatgcagccaaaataaaccacacaatggtgatctggaacttgggctcatcattttaaacaaaaccttgggcttgtgggtgggccctttaatttgaacaagaacaagctcaattaacatctgtagatcaaatgagagggggaaatatagaaagtttggctgcaattcagcagactaagatgcttgcacatacactctctcaaaacagtgatcctaaatttcagaattcaaaatttcttcaatttgtatcaaagatgagtcgtggtgaacttatcattgacgataatcaggtcaaaccagcatcagagaactgggcaacagaatatcagcaacagtacaatggaggtgcttcttgggctgatgaatntgttcatgatga

SEQ ID NO: 1893 - DNA, 447 bp, Gossypium hirsutum
  unsure (1)..(447): unsure at all n locations; Clone ID: LIB3493-052-P1-M1-F7
ggaaagtcttcggacctttccagaaagggaacgaaacaaaaaaaatcactgaaaatgtggcatttcccccaatccttcattctaagactaattcaaagtcttgggctttcctcccatcattcacgcattaagccccttcttgattttctcccgcaaccaaatttcaatggcggaagcgccgcttgaaccacaaatgggctctgaacttgaatcgctggccattccaccaatggatccgttgtatctctcctcagatctagggtttcctctcgacgaaaacgatgatttccagcttaccttcgacgatttcgacgaattgtacttcccttccgattccgaccacctcatcatgcccgattcttncgacgcacccgctttcacatccgaatcgtacgtggaaaggtacctcaattcttccttcccgggacttgacagtttcagcgggcc

SEQ ID NO: 1894 - DNA, 366 bp, Gossypium hirsutum
  Clone ID: LIB3493-052-P1-M1-F8
cgccttcacttccaatttagggtttgcacgagccgtagtgcgccgttttgcatcaggaagaaatggcggtccctttgctgtctaagaagattggaagaagcgtgtcaagaagttcaagaggccccaaagtgaccgcaagatctccgtcaagacaaactggcgaaggcctaaaggtatcgactcccgtgttaggaggaagttcaagggatgcactttgatgcccaatattggttatgggtccgacaagaagactcgccactatcttcccaatgggtttaagaaatttgtcgtgcataacgtccaagagctggagcttctcatggtgcacaacaggacatactgggcggagatagctcatgatgtttc

SEQ ID NO: 1895 - DNA, 372 bp, Gossypium hirsutum
  unsure (1)..(372): unsure at all n locations; Clone ID: LIB3493-052-P1-M1-F9
atttttcagagtagaagcttcactaagcttactccttccttccttccttttttttgtttctgtcgcttccatgactgtctggtttaaaatgccgtcgttttgggtttcttggtgggtcttatgatgctgggttgggttagctctgctgagtttcataagctttttcaacctggttgggcaaacgatcatttcatctatgaaggagagcttcttaagctcaaacttgataatttttctgtgctgggttgcatcaaaaagcaggtattgttggaaagtatcttgcagataaacttgtagaggtgactctgntggactgtcactgctnactatatgtcatcggagggtccataccacaatgagttcgacttcgag

SEQ ID NO: 1896 - DNA, 445 bp, Gossypium hirsutum
  Clone ID: LIB3493-052-P1-M1-G1
ggcgctttgcatattccatacgccagcgtaatgccctgaagagaatgcaaaatgggtctctggcgaggctgctactattatacttcactctaataagaggttcaacctagtactgggtggatgaaggatatctgtacgcagtgcttgcatatgggaccaagctgatagctcctctaaacctctgtactggacagtcactagcccaactctgtctgcttcgcatctccaagacttacctggtttcactcgcagcgtttacagaagggaccatgcgttaataacgccagaaagtcatgttttcagtcctttgcctgattggacaaatacactgggagcatatttaataactcccgcaattggttcacatttcgttatgtatctggcaaaaatgcaagaaaactcgaggtcagggcttccccctaatgatgtggagaggctcatattt

SEQ ID NO: 1897 - DNA, 409 bp, Gossypium hirsutum
  Clone ID: LIB3493-052-P1-M1-G10
ggcgtctgtaataaaatctgcaatcttaattctgtcggtgtttttatctgtaagcttcagttcgggtgttaggttgctccaggaacagcccaatgatgacctcaaaaacatggacgctattcctcccattgatgcactcaaccctaccgagttcaatggacccggtgttggcattcacgaagatcatgttgtcccaaaaggttccgaaattggtactcttggttttggttttgaaggtggtcctgaaaaatgttgttcttctggatgttccggtaattgtaatcctggtggtttcgttctaccattttctcaaattccagaaatccccaaaattccacagatcccacagattctacaaatcccacaaaattcacttatttcaccagatcccacaagtcccacaaatccc

SEQ ID NO: 1898 - DNA, 323 bp, Gossypium hirsutum
  unsure (1)..(323): unsure at all n locations; Clone ID: LIB3493-052-P1-M1-G11
gggtcattcttgggcattctgaacgcagacatgttattggtgaagatgagcagtggataggaaagaaagctgcttttgctctaaatgagggtcttggagtgatnagcttgtatttcggtgaactattagaagaaagagaagcagggaaaacttttgatgtatgcttccagcaactgaaggcttttgctgatgttgtacccagttgggacaatatagttattgcttatgagccagtatgggccattgggactggtaaggtggctacaccccatcaagctcccgggggacatggagctggccctgattggcttaaaaagaatgtt

SEQ ID NO: 1899 - DNA, 400 bp, Gossypium hirsutum
  unsure (1)..(400): unsure at all n locations; Clone ID: LIB3493-052-P1-M1-G12
cggctaccctgggcagtggaaacctaagggaagcagtgaggctacctcctggggaggatttaaatgaatggctcgcagtcaacactgcggatttttcaatcangtgaatctgctctatggtaccctgactgagttttgtactcctgagaactgtcctacaatgaccgcaggccctaagtatgaatatagatgggcagatggcgtgcaaatcaagaaacctatcgaggtttctgccccaaaatacgtcgaatatctaatggactggatcgaaacacaacttgatgatgaatcaatatttcctcaaaaactgggtgcaccatttcctccaaacttcaaagatgtagtgaagacaatattcaaaagactgttccgagtatatgcccacatctatcactcttac

SEQ ID NO: 1900 - DNA, 457 bp, Gossypium hirsutum
  unsure (1)..(457): unsure at all n locations; Clone ID: LIB3493-052-P1-M1-G2
cgatctcgcagcgtctaagaacaaggaacttgagaaattagtgctccaaaggcagctggttcctgttaaccggaaatttgacgtcatgtctccgggagaaacggctcccggtcacctctagacaagcctctgaaccagcttactgaggatgacatttctcaggtcactcgtgaagattgccgccgttacctcanagaaaaaggatgcggagaccgtcttggacaaatcgcaggcgattcagcaggtgatctcgttgaaaactcttctagaaacgacgtctgattccgacgccgttgaagctcggaagaaactttaccctccctgcccggaatatccgcctcgcgtcggttctgattcaaacgttctaccgagggaaatgacaccgaataacgggatattggttccagttttcgaatccgttccttgtcccctttcaaatccctcgaaatccgatttt

SEQ ID NO: 1901 - DNA, 375 bp, Gossypium hirsutum
  unsure (1)..(375): unsure at all n locations; Clone ID: LIB3493-052-P1-M1-G3
cccacgcgtccgttaagatcatcaatgactgccttgatggactcatcagaaatgcagaagatagcagacaggaagcggatgttgaaaagctgcagcnagggacctacttgaatattaaggatgcaagtgtttttgcgttttttggtggacatgaggggagctgatgttgatgatcgtcagctgagagatgatctaatgacgatgcttattgctggccatgaaacaactgcagctgttcttacttgggctgttttccttcttgcacaaaacccgtctaaaattaaaaaagctcaagcggaggtcgattcagttctcggccaaaagagtncaacttttggatcaattaaaaagttagagtacataagacttattatc

SEQ ID NO: 1902 - DNA, 404 bp, Gossypium hirsutum
  Clone ID: LIB3493-052-P1-M1-G4
aaataagttgaaggagcttgctgagcaatatgccctctctgaacaacaatatgcgcagaagctaaaacaaaaaacactagaactacagctttcgggattgaaatcaagcaacatgaagagaaattaatccaagaacaagcgcagatgaaagtatatgcagaacaagtgtcacagttattagtgactgaaaagaatttacgcatgcagttgacagctgatggagaaaaattccaacagtttcaggatgcattgtcaaagagcaatgaggtgtttgaaacatttaagcaagagattgagaagatggcaaaatcaatcaaagaactcaggaaagaaaatgtgttcttgaagagcaaatgtgacaaatcagattttactctcatagaacttgtggaagagcgcgagcg

SEQ ID NO: 1903 - DNA, 458 bp, Gossypium hirsutum
  unsure (1)..(458): unsure at all n locations; Clone ID: LIB3493-052-P1-M1-G5
aaactctgatctttatgggccatggaagcggaagaatctttctgagtatggcatggtgactcagtgtatggcaccagctagggtgaatgatcaatacctacanatcttcttctgaagatcaatgctaagcttggaagtctcaattcaatgcttactattgagcagacaccttcaatccctatgatttcaaggattcaactatcatccttggaatggatgtatctcatggctctnctgggcaatctgatgtgccgtcaatagctgcgggggttagctacaggcaatggccattgatttgccgctatagggcatcagtccgtacacagtcttcgaagcttgaaatgatagattctcttcttaaaccagtttctgacaaagtggatgagggtatcatgagggaagctctcttagacttctataccagttcagggaagagggagcctgttcagatcattttt

SEQ ID NO: 1904 - DNA, 413 bp, Gossypium hirsutum
  Clone ID: LIB3493-052-P1-M1-G6
cctgtcactgtttttggcatcagaaaccctgaggaaatcccatggggtgaaaccggagctgattatgttgttgagtctaccggtgttttcactgacaaggacaaagctgctgctcacttgaagggtggtgcaaagaaggtggtcatctctgctcccagtaaggatgcccccatgtttgttgtgggtgtcaatgagaaggaatacaagtctgacctcaacattgtctccaatgctagttgcactaccaattgccttgctccattagctaaggtcatccacgacaagtttggcattgttgagggtcttatgaccactgtccattcgattactgcaacccaaaagaccgttgatggtccatcaatgaaggattggtgaggtggtagagctgccttctttaatatcattcccagcag

SEQ ID NO: 1905 - DNA, 417 bp, Gossypium hirsutum
  unsure (1)..(417): unsure at all n locations; Clone ID: LIB3493-052-P1-M1-G7
ctgtaattgatttatgtatgtgtataacataaagcgtggtgatttggaaaaagagatgtaacanacatgcagtgtaagtatattttctcatactgcacatgtttgattcacgaaattctaaaaagctatttgcttatcgagaaacctctaaggatgtgggacgccagcttgcagagattgtttcagtctgaagaattctgctttacctttatctaaacccaaatcatggcttagtnnagttcttcctcacccggaatcagagcnncctcctgtgcaaagcannaatgaagggtagcnnttttttttattgatnnttagttgtagaccttgttttttttcttgcatttgtnngctttggcagnttttgccaagttttgtgggaaaataatatagntaattattctcctgtattgttct

SEQ ID NO: 1906 - DNA, 433 bp, Gossypium hirsutum
  Clone ID: LIB3493-052-P1-M1-G8
cagaatttgatatcaagagatatggatgaactcctgagaattgcagctgctgataagagggaagagttaaaaattttttccggagaggtggtacgatttggaaatcgttgtaaagatcctcagtggcacaatttggatcgttattttgaaaagttgggttcagaacttacatttgaaaagcaattgaaggaagaagcagagacaataatgcaacagttgatgacttacgtccattatacagctgaattatatcatgagttgcatgccttggacaggtttgaacaagattatcgacgtaagcttcaggaagaggataattcaaatcctgctcaaaggggagacagccttgcaatattgagagcagagttaaagagtcaaaataagcatgtgaaaaatttgaagaaaaaatctctttggtctagaatttttgaag

SEQ ID NO: 1907 - DNA, 58 bp, Gossypium hirsutum
  Clone ID: LIB3493-052-P1-M1-G9
caagcttaaggaactgcagaaatggccccaaagagaggtgtaaaggttgctgcccggg

SEQ ID NO: 1908 - DNA, 534 bp, Gossypium hirsutum
  unsure (1)..(534): unsure at all n locations; Clone ID: LIB3493-052-P1-M1-H1
cgttccgcggacaaccaagccggtggtttgtcttgggacacgaaaggatatttcaagtccttacaaccaattggcacaccggcggccggagaaaagtcgccggtaggaaaatctttaccgaggatccgtccgttggcttatattaccggtcaggctcaaaatttggctacttcttcttcttaatcttatgaacaactccacgccaacccttcttcgncgcaagatccacctactgatatttcgacacaacccgccggttctcctgatgtcgacgatgaagcctccagtcctgtgttgctaaaacatcaccctgtttctgatgctgatcagggtcagaccagtgcttataatggtggaattgatgaaggatcagcatccagccgacgggataggagcattgagccttcaaatggttctgcttttgatacaagtggtgaaccgaattcatttctggtttcatcaaatgatcgaagttcaccaatttccacgtcagggacagtacagggttcagaaacatcggctcggaaacataac

SEQ ID NO: 1909 - DNA, 418 bp, Gossypium hirsutum
  Clone ID: LIB3493-052-P1-M1-H10
cggacgcgtgggctattattccctgtgcgtataaaccctaaaatttcaaatttcgcttctcgcgttctagggttctctttctcttcgccaagatggcggattctcctcgtaaaaggaattctcagtctccctccccatggagagaacagtcaaggtcacgatccagatctagacctaggtctaggtctaggtcaagatcccgctcctggtcgaggccaaggcataggtccaggtcgcatagtcgcggcaggtcaaggtcaagaagtcgaggcagggttgtagctggaaatcctggcaacacactttatgtgaccggtctatctcaaagggtcacagagagggaccttgaagagcatttctccaaggaggggaaggtggcatcgtgtttcctggttgttggacctcgtactcgcatatc

SEQ ID NO: 1910 - DNA, 284 bp, Gossypium hirsutum
  Clone ID: LIB3493-052-P1-M1-H11
gtttaaaatataagaaaaaaaatcatacgcaatgagcactgctggtcaggttattcgttgcaaagctgcggtggcatgggaggcggcgaagccactatcgatagaagaaagtggaagtggcaccaccccaaaagcatgaagtccgtattaagattctcttcactgctttatgtcacactgatgtatactactgggagtgtaagggttacactcctctgtttcctcgtatacttggtcatgaagcctcaaggatcgtggagagtgtgggtgagggtgtgaattat

SEQ ID NO: 1911 - DNA, 97 bp, Gossypium hirsutum
  Clone ID: LIB3493-052-P1-M1-H12
gcttttccgagaatgtgactcccttgtgaggaatttacagggtagattggaaatactttcagtgtctgtacatgccgagggggatacgcaagtggat

SEQ ID NO: 1912 - DNA, 394 bp, Gossypium hirsutum
  Clone ID: LIB3493-052-P1-M1-H2
gttaaatcgaatacgtaaggtcaatatccagcaacaatatgatattattatcatcggtgctgactccaatttgatataatccatcaatggcgagcgagggataaacaggttcatcaagctttggctctgcataatcatttcctgtgctactctactcataggagaacaagaaaccctaaagactgtacgctcttgttattgcagaatggctattctcgcacccactaacattctcatcattcgtggacactgttctcattttgcttgtactcaacttactttcgcttcggcaagccttatcatcccatctttcttacctcgtcattgcatgcttgttcctataaaatcaacacacccttacatctaaatgtctatcaaacacctacaaactatg

SEQ ID NO: 1913 - DNA, 279 bp, Gossypium hirsutum
  unsure (1)..(279): unsure at all n locations; Clone ID: LIB3493-052-P1-M1-H3
atactattacagagcttttgaacttgttgaaaataaatggctcaaggctcagctgcagttccgagtactgangtatagaatggccgagaaagacaccgccgcctcttcatgctgtctaccgtgtcggtgacctcgaccgtactatcaaattttacaccgaatgttttgggatgaaactgttaagaaaaagagacattcctgaagagaaatattccaatgcctttcttggatttggaccagaagaatctcatttcgtcatggagttaacatataattatg

SEQ ID NO: 1914 - DNA, 129 bp, Gossypium hirsutum
  Clone ID: LIB3493-052-P1-M1-H5
cgtactttgtttgccatatcgacaccgcatctgtcagctctaacagtatggttgggatgtggaacagttctcagattgatatatattatcgcggcatgtgtgctctctgctaaagactggagcgtaatg

SEQ ID NO: 1915 - DNA, 378 bp, Gossypium hirsutum
  Clone ID: LIB3493-052-P1-M1-H6
gcttttccgagaatgtgactcccttgtgaggaatttacagggtagattggaaatgctttcagtgtctgtacatgccgagggggatacgcaagtggataattacgatgatgaggatatatcatcacagctgcccaaggattcggccaagtcagcatcatcacgtttacccccagaatcttctgattcagttatccaactaagtgagaaaatacaaaagaataccatctattcaggaaatgggaatgctgaaggggaggcaaagcaacataagtgcagcacatgcaatgcatttgtgggggattccaaacagtacagggatcactttaagagtgagtggcacaagcataatttaaaacggaaaaccaggcaactttcttc

SEQ ID NO: 1916 - DNA, 279 bp, Gossypium hirsutum
  Clone ID: LIB3493-052-P1-M1-H7
gttcgatcgtttaacgcaaacccatttttaagtgagggaaaggtttcagttcagagtcataagcaacatcaatggctccttcaactctgacggctcttgcggaagagaaaaccttgcaggcaagcttcgttcgtgatgaagatgagcgtcctaaggttgcttacaaccaattcagtaatgatatccctgtcatctctcttgctggtatcgatgatgttgatggcaagaggggtgagatatgcaagaagattgttgaggcttgtgaggatttgggtgtct

SEQ ID NO: 1917 - DNA, 366 bp, Gossypium hirsutum
  unsure (1)..(366): unsure at all n locations; Clone ID: LIB3493-052-P1-M1-H8
gttcagataccattgataatgttaaggcaaaaattcaggacaaggagggaattccgccagaccaacagaggctgatttttgctggtaagcaactggaggnnatggccgtaccctggctgactataacatccagaaggagtccaccctccacttggtgctccgtcttcgtggtggatgcagattttgtgaaacactactgtaagaccatacctggaagtgaagcttgcacantcatatgttaggcaaatcaagatagaagatcctcaaccacaagctgtttgtggaagactgagatggaggccttgaatacacatcagaagatcaccctcattggtctcgtctcgggggatgcaattttgtagacct

SEQ ID NO: 1918 - DNA, 459 bp, Gossypium hirsutum
  unsure (1)..(459): unsure at all n locations; Clone ID: LIB3493-052-P1-M1-H9
gatgattcaaccttctctgatttcttactcatttcagtctgctcccgaaccagcactgcttgatgtggctgcaattgcagctgacaggatcctgcttttagaattcttatttcacnncgttgtaattntttcatgggctcaaaactattgcntttcagtggcggaaaagcttggataccccacaatccaaccctgaagccatcagnggcatttngccnnncagttgcttgcaaagccttcctaggnngatnngatgcagattgcannataatcacaggaaaagaatttccagttccctcgtctaagtcattttgtgaccaagcatggnctcaaacaggcccgttttctttctagcaaagtttgaatcccttcctcaacatacnaactcagacagtcatcatccgggcggagatataatctntactgatgatgtcagctttgaggtgttcttggatcatc

SEQ ID NO: 1919 - DNA, 442 bp, Gossypium hirsutum
  Clone ID: LIB3493-051-P1-M1-A1
gatcttcatctgttcttccttttggtctagtctctccgtcttgtattcttttccttcattttccgactcatcgttgtatttttttttaaaaccctcaccgatggcgaccgctatggtagaagattctagctttgaagaagaccagttggcttccatgactaccgaggatatcgtccgagcttcccgtcttcttgataacgagattcgtattctcaaggaggagatgcaaaggacaaatctcgagttggattcatacaaggaaaagattaaggagaatcaagagaaaattaagcttaacaagcagttgccttacttagtcggcaacattgttgagatattggagatgaaccctgaagatgaggcaaaggaggatggtgccaacatagatctagactcacaaaggaagggtaaatgtgttgtgctgaaaacctctactcgtcag

SEQ ID NO: 1920 - DNA, 377 bp, Gossypium hirsutum
  Clone ID: LIB3493-051-P1-M1-A10
gttgcttcacaatggcctcgcagccatggctctttcttgcccatcattcgccggtaaggcagtgaagttctccccttccacccctgaaatccggggaactggccgtgtttccatgaggaaaaccaccaagcctgttccttctggtagcccatggtacggtcctgaccgagttttgtacttgggtccactttccggtgagccaccatcttacttgaccggtgagttccctggtgactatggttgggacactgctggactctcagctgatcccgagacctttgctaggaaccgtgagctcgaagtcattcactgcagatgggccatgttgggagctcttgggtgtgttttccctgagctgttggctaggaacggtgtca

SEQ ID NO: 1921 - DNA, 374 bp, Gossypium hirsutum
  unsure (1)..(374): unsure at all n locations; Clone ID: LIB3493-051-P1-M1-A11
tcttcctcggactcctnnnttctccaggaggtgattctacatagtagtacaaancanccccttccccttccccttccttttccctcccattcacaaacttattccctcaaccctttctttctccctcgcctcctctgccatggatagtgcctcaccttctatgctctttttatgtggaaaatcatcatcagaatgggaagtccccaaatccttgaaaatcaactacactcttaatctccctaactgcggcaaagtttctgctcttttacaatccgagattaatactttccgatttggtgaatatacttttaatgtccatttgtttttgaactcactctccaccaaactattccttctgttccttattttatccc

SEQ ID NO: 1922 - DNA, 404 bp, Gossypium hirsutum
  Clone ID: LIB3493-051-P1-M1-A12
aaggaaagcaagtagtttgagagaggcatctctctcctatacacattctatctctagtatggcgccaattcggatgatagatatcgccgtcaacttcacagatggcatgtttaaaggcatttataacggcaagcaacatcacgtttctgatattgctactgttctgagtcgagcttggaacgctggcgtcgatcgaattatcgttacgggtggttcccttgaggagtcaaaggaagctcttgctattgcagaaactgatgggaggcttttctgcacagttggagtgcacccaactagatgcaaggagtttgaagagagtggggatcctgaaaaacattttcaaggacttttggcattggctaaggagggaattcaaaaagggaaggtggttgcaattggtgaat

SEQ ID NO: 1923 - DNA, 507 bp, Gossypium hirsutum
  unsure (1)..(507): unsure at all n locations; Clone ID: LIB3493-051-P1-M1-A2
cctgttcttcattctactccatcggcacggcccctcctcacccaaaccctacaaaatggccgccgccgcgcgccctcttgtctccgtccaaaccatagagtccgacatggctactgatgccactccaaccgttcctctcgctgatgtgatgaaagcctcgattcgacccgacatcgtcaccttcgttcacgacaatatatccaaaaacagccgtcaaccctatgccgtctccaaacgcgctggtcaccaaacttcagctgaatcctggggtaccggtcgtgccgtctcacgtatccctcgtgttcctggtgggggtactcaccgtgcaggccaaggtgctttcggaaacatgtgtcgcggtggacgcatgnttgctcctaccaagatctggcgccgctggcaccgganaatcaacgtaaccagaagcgtacgcccgtgttctgcatcgcgcctcgtgtcctcctcgcatgacgtgcacgatgagtgccgaatccgtgcatttgcctg

SEQ ID NO: 1924 - DNA, 538 bp, Gossypium hirsutum
  unsure (1)..(538): unsure at all n locations; Clone ID: LIB3493-051-P1-M1-A3
atttgtttggagtccagatatgtggggcgtatcctgacactatagcacgtactgttgaacttatagaaaaggagtgtacggtggacttcattgacattaatatggggtgtccaattgatattgttgttgataagggtgctggatcttttcttctcacaaaaccattacgtatgaaaggaatcattcaagcagcttctggcactgtagataaacctataactgttaaggtgagaacaggttattttggaggtaaaaaccgcattgattcgctaattgcagatattggcagttggggtgctactgcattgacaatacatggtcgatcacgtcagcaacactacagtaaacttgctgattgggattatatataccagtgtgctcagaaggccccttgtacattgcanggttttgggtaatggagatattttctcatatttagattggaacaatcgtaaaactgactgctctgagctttctacgtgtatgattgctcgaggggcattgattaagccttggttatttactgaaatcaaggaac

SEQ ID NO: 1925 - DNA, 507 bp, Gossypium hirsutum
  Clone ID: LIB3493-051-P1-M1-A4
cttttagcaattaggaattgcccggtggccattcctgcactaaaatcaatcaaaaaaaaggaatcaaaattcaaaaccttgttcttttatccactgctttaaagctctaaatcaaattattacgtaggaacttatagcaatttatccctcttcatgggttgctcttcttctctcccagatcggagttccgggcggtccactggacttaacaacgcggacaatcctgaaggtcccgatgccaaaaatctacgcgtaaagctggtcttgttaggtgattctggagttggaaaaagttgtattgttcttcgctttgttcgtggccagtttgaccctacatctaaggtaactgtaggagcttcattcttgtcacagacaatagctttgcaagattcaactactgttaagtttgaaatatgggacactgctggacaagagaggtatgctgcattggcacctctctactacagaggagctggagttgcagttattgtgtatgatataactagt

SEQ ID NO: 1926 - DNA, 565 bp, Gossypium hirsutum
  unsure (1)..(565): unsure at all n locations; Clone ID: LIB3493-051-P1-M1-A5
cggacgcgtgggcggacgcgtgggcttgaccgcttctcggatggtacttgcagcatctggtgttgaaaacgaggaactgttatctgttgccgagccacttttatcagatctttccaatgttcctcgtcctcaggagccaaaatctgtgtacaccggcggtgattatcgctgtcaggctgatttaggggatcaaacacattttgctcttgcatttgaacttcctggtggttggcacaaggagaaggaagctataattttgactgttcttcagattttaatgggagggggtggatcattttcagctggtggccctgggaaaggaatgtattcaagactatatgtccgtgtgttgaatgagtatccacaagtttattcattttcagcattcaacaagcattacaatcatactggcatatttggaatacaagctaccactggttctgattntgcaccaactgccattgatgtagctgtcaaggagcttattgctgttgcaacacctggacaagttgaccaaatacaactagaccgtgctaaacagtcaaccaagtctgcatttttgatg

SEQ ID NO: 1927 - DNA, 395 bp, Gossypium hirsutum
  Clone ID: LIB3493-051-P1-M1-A6
cttcttgctgtttttctgccatgggtggtgcagttctaaaaccagaagactgtttaaagctacctaatcccatgaaacaacctcaaaacccttggcataatcctaatcccaacactaaccgcacgaatcgttcacaagggaaccgtaagaagcgttctcccaacacctcccctccttctcgtcccaccgtcggtcgccccaaagctccggccaagaatctcgtcatgggtcaagtcaagatcctcaaactcggcgaagatcttaaacaatctaagccggataagcatgtgaggttcgcgaaggaaaacgttgatgtagatctggtttccaccgactgtttgggtccagatcccgggtccgtcccgacccagatccgactcaccgagtcagaaaac

SEQ ID NO: 1928 - DNA, 350 bp, Gossypium hirsutum
  unsure (1)..(350): unsure at all n locations; Clone ID: LIB3493-051-P1-M1-A7
cttgagtggtgaangaaatgagaggggtcacgatctattgcgttttggatgtcactcctttgtcccttggactcgaaactgctggcggcgttatgactggtttgattccgagaaacactaccattcccaccaagaaggagcaggtgttttcaacttactctgataaccaacccggtgtcttgatccaagtttatgagggtgagagagctcgaacccgggacaacaatttgttgggtaaattcgagctctctggcattccaccagcacccagaggcgttccccaaattacagtttgcttcgacattgatgctaatggtatcttgaatgtctctgctgaggacaagactact

SEQ ID NO: 1929 - DNA, 377 bp, Gossypium hirsutum
  unsure (1)..(377): unsure at all n locations; Clone ID: LIB3493-051-P1-M1-A8
gttgaaattnaaaaacaagaggggtcacgagacttgcagagattaaagaagaacagggccttattggtgaagctgcagatttaatgcaggaagttgcagtggaaacttttggtgccatggcaaaaactgagaaaattgccttcattcttgaacaagttcgcctctgcttagatcgccaggattatgtccgtgctcaaattctgtcaaggaagattagtcctagagtatttgagggcgatacctccaaggaaaagaagaaacccaaagaaggtgacaatggtgtggaggagcctcctgctgatataccttcactattggaggtgaagcgtatctactatgaactgatgattagggattactttcataacaatgactac

SEQ ID NO: 1930 - DNA, 274 bp, Gossypium hirsutum
  unsure (1)..(274): unsure at all n locations; Clone ID: LIB3493-051-P1-M1-A9
cctttgggtttgaaacaatggantgcgacaccaaaatgtcagctcttcttttcatttncattcttttcatttcttcactgacaccaattcttgggtgtggttcatgtgggaaagcacacaagcatctaaagcctaanggaaagtcccctaaaggtcccatcactttgcctccccttgtgaaacctccaatcaagttgccaccggttgttcctccaatagttaagccacccattgacctccctcctgttacgggccctccaattaaccttccccc

SEQ ID NO: 1931 - DNA, 501 bp, Gossypium hirsutum
  unsure (1)..(501): unsure at all n locations; Clone ID: LIB3493-051-P1-M1-B1
aggttgaggactgcttgtgagagagcaggaggactctttcatcgaccgctcaaactaccatcgagatcgattcattgtacgagggtattgacttttacaccacgataactcgtgcaaggtttgaggagctcaacatggatctttttaggaagtgtatggagccagttgagaagtgtttgagggatgctaagatggataagagcagtgtccatgatgttgttcttgttggtggttccactcgtattcctaaagtgcagcagttgttgcaagacttcttcaacgggaaggagctctgcaagagcattaatcctgatgaggccgttgcttatggtgctgcggttcaagctgctatcttgagtggtgaaggaaatgagaaggttcangatctattgcctttggatgtcactcctttgtcccttggactcgaaactgctggtggtgttatgactgttttgattccgagaaacactaccattcccaccaagaaggagcaggtgtttt

SEQ ID NO: 1932 - DNA, 359 bp, Gossypium hirsutum
  unsure (1)..(359): unsure at all n locations; Clone ID: LIB3493-051-P1-M1-B10
gttttgggttcaatttnatgagcgattctatactacccttcttcttcttcttcaaacaagcanaaaaacaagaggaaaaaaatgggtggagaaagaaaggtctacactttggctgaggtttctcaacacaaccatgctaaagactgatggcttgtcattgagggcaaggtatttgatgtgactaaattcttggaggaccaccctggtggtgatgatgtcttgctgtcttccacagggaaggatgcaactgatgantttgaagatgttggtcatagtagcagtgctcgagcaatgattgatgagttttatgtgggtgacatcgatacatctaccattccctctaagaggaagtacactcc

SEQ ID NO: 1933 - DNA, 500 bp, Gossypium hirsutum
  unsure (1)..(500): unsure at all n locations; Clone ID: LIB3493-051-P1-M1-B11
tatactactgggggaatgggggcggaaatatctaaagctgcaatgatttcaaanctctgaattgacgtttacatagtgaaggctgccacaagccactcattgagagcattgaggggagaactgatacatggcataccagacgactgactcgggactgttatccggttctcaagatagatcgcatgaggtattggagcatattttatgactaaccacggaacaatatcttggagcctttttcaagtgaagatataaattctaagaaagtgacattttgcgtcaccatgcttgtctctcttcaaagtctgaacttccacaacctgtaataacatttatgagactaaagaattggttgatggtttaataaagattatgaacaacattaccaaatccctctacttttcaatttttatggatttacttcttatataattaatccgaaaattatatttagggtcctatttatttataaatactagataaaactatatttcaacttc

SEQ ID NO: 1934 - DNA, 588 bp, Gossypium hirsutum
  unsure (1)..(588): unsure at all n locations; Clone ID: LIB3493-051-P1-M1-B2
atccagtggaggctaaaaatgggggttgtgcagtctgtgcaatgagggtgggcgttgatatggttgcgcatataaccctacaacatggaaatatatttaagatgcagcgcaagaggaaatcacgtaaaggtggatctcattccacgctttctcttctgaggaaagagctgcgagaaggaaatctacagtccttcttcgggggttcttcttgtacagtgtcttccaattcagcacctgatccgttgttgtcttcatttattttacccatggttgatgactttgttagtgtccagcctaacttttctcgtgaaacaagaacaactaagaaaagttcggacgtgaataagtcagaaagaaatgtgaagtcgtctcccctttctgtaaaagatcatgaaaagatggcaaaaagatgcgagnttgtccaagggctgctgttgttcacaatgcctgatgaaattttataaaacagcgttctcgggtttaaatcggttgctgcaatggaatcgtgaacctgaatcccatggggaaattgggttgacgatgaagagcctcccggcaagcaaacttgcaaatctacagttcattact

SEQ ID NO: 1935 - DNA, 409 bp, Gossypium hirsutum
  unsure (1)..(409): unsure at all n locations; Clone ID: LIB3493-051-P1-M1-B4
cttaaggtcttccattaccctgggctggcagtgcagttcagttcgctgttgggacgataattgtttccctaatgtggacgtttaacttgtataagaagccgaaagttagtggtgaacagctagtagcaattgtgcctcttgctttggtgcatatcttgggcaacctctttacgaatatgagtctaggaaaagtggctgtttctttcactcacaccattaaagctatggagccattcttctcagttgtgctttctgcaatgtttttaggagaggtgattttcttttcttgtttagttattttttttatcatttttttcattcacattttcataattatagtttatctataatttcctttntgagttgcctttattcgggtgttaaatttcgcttttacagctgccaactc

SEQ ID NO: 1936 - DNA, 348 bp, Gossypium hirsutum
  unsure (1)..(348): unsure at all n locations; Clone ID: LIB3493-051-P1-M1-B5
agaaagttgttgaagtcaatgcaggtgcgaaggcattagctggtcaaaangatnangccttcttctctgccaatgctgctgctcaggcttcaaggaaatcctccccaagagtgactaacgaggctgttcaaaaggctgctgctgctttaaaaggctctgatcaccgtcgtgcaactaatgttagcgctagactcgatgcccaacagaaaaagcttgaccttccaatcctccccaccacaaccattggatctttccctcaaaccttggagctcatgagagttcgtcgtgaattcaaggctaacaagatctctgaggatgattacattaaagccattaaggaggaaatta

SEQ ID NO: 1937 - DNA, 372 bp, Gossypium hirsutum
  unsure (1)..(372): unsure at all n locations; Clone ID: LIB3493-051-P1-M1-B6
attaaccatctagcacacaattgtngcgctttctgttcttaccccctttttttctgtttttgtttctgtttgtttggggaagggtcaaaaaaagaacactgtttgatgtctgtttggctgttccaaagttgcagttaatatggcgttagatgataacaaagacaagcaagaagctgaggataacaaggcaactcgtcctgaagagagtgatgatgataatgaagatgacaatgctattccattaggtccacagtgctctctcaaagaacagcttgaaaaagacaaggatgactagagcttaaggaaatggaaagaacagcttcttggaagtgtggatattaacaacattggagagacactctatccggaagt

SEQ ID NO: 1938 - DNA, 336 bp, Gossypium hirsutum
  unsure (1)..(336): unsure at all n locations; Clone ID: LIB3493-051-P1-M1-B7
taccagtagcatctctttcgagcgtgtgtatatccttcattttcatggaagattctcggagctttaangagaaacaacagcttaagcggctgtttccgagcaaaatacatgggacagaacagaattctcttattgaatatcaagtggagttggctgctattgcgattagccttaacgtgcgtttgagaccatctcatatgcccgtttacatgcaagaacactccctccggtgtactctacagcttcttgattctgcccccaaaccccaacctagccttactcacttggcttcagccatcaaaaaggagttttactctgtgtactgaccaccattgc

SEQ ID NO: 1939 - DNA, 435 bp, Gossypium hirsutum
  Clone ID: LIB3493-051-P1-M1-B8
taactctactaccatctcactataagcaaagctgcgtgcgcctacacatacctgatcctccaattcctcactcaacccacccatccagtgttcaacattaataacggttgggctaactatcttaaacgtgtcttccttgctttaaactcccatattaatccacaccatgaaactatctacttcacctcacacattatgatcataaaccaccctttccctatttccaatctttatcccctaatcctagacttccacacctctaacattcatttcaaattttctgatctttttaccacaatttacacacaatctgcccctgaactctagaattaacccaatattttacacaactttgatgcacttattataaacacaatctccaccaaacccataaacagtttacactttatacaaatacccaccactctaactttt

SEQ ID NO: 1940 - DNA, 242 bp, Gossypium hirsutum
  unsure (1)..(242): unsure at all n locations; Clone ID: LIB3493-051-P1-M1-B9
gcctaaaacctcttcaaaggtactgtacaacacattctttcttctatctactttacttctcttctccattaaactaacctctcctaaaccccatttcttctcaaacattatgtctaccaaacactttattctcactcaacactaactcattcatattcacttctactttcactacttctttactcactaaactccactgatatcttnntcntcattncatcctttaccaacaaatcctctac

SEQ ID NO: 1941 - DNA, 519 bp, Gossypium hirsutum
  Clone ID: LIB3493-051-P1-M1-C1
gagagagtgctgtgatattagaagcaggagttgtgagagcagaagagaaggtcagagttgctgaaatggatgctgaggcaagaataaaagatgcagcacagaaagaggctgctgcggtgaaggaaaagcaagaacttcttgcttatgtgaatgtcttacaggcacatctccaaagacaacagagtgacgcaaagcaaatttttgaggagaagaccgagtcttcaaataccagtaacagtccacctgatacgaagaatgttgacttgtcagagaatgtcgataaagcttgtcttagcgtttctagagcagtgccggtgccaggggagagcgtagtccgcatggcagtggatcaagtcaacatccaaccagttggtgagggtgaatggagtgattattcaggcacagaggcaagaatagctgatgtgagagagatagccccagagacagaaggaagcagccatgacattttcgtcgataaccaagcaatcgataagcaccatgagccaggagcaagctttt

SEQ ID NO: 1942 - DNA, 393 bp, Gossypium hirsutum
  unsure (1)..(393): unsure at all n locations; Clone ID: LIB3493-051-P1-M1-C10
ctactaccccancaatnaagcagaggtgaccttccatttatgttgganggtctctcggaggatgctcgtgtcaattgttggaacttgagccaggcagcaatgagacatgagactgagacctgtttcttttatgctgatcagttgaagcaaagatgtgtggaacagttcaaagaagggactttggggattgaacagcttgccgctgttgatgggttatgctacttagtttctaaagtggttgatgcatctgaacctgctaggacataccatgttaatctttcgattttcacttccatccctgatttttggagtattggtcagatttttcccatagtccccattcatcgattggatgaaaggccttaagtgagggggatttttgtcttatttaac

SEQ ID NO: 1943 - DNA, 399 bp, Gossypium hirsutum
  Clone ID: LIB3493-051-P1-M1-C11
attagctgccattcttgatggaggttggggccaattggatgattttcatgggcaacctacccaagaagcaaaggtgaagaaattagatgtactattgggtgttgattcaaaaccattaaaagtagatacaactgggaaggagtatggtgggtatttcccttcggtgggaggaagaggatctgatgcacttaatggttcaagcctgtatgactctccaaagcatttgaagatgcaaaatagtattgatttatcacgtgggtatcctagaggatcatcattgtggtcaagccagatgcaacaattagatgcttatgctcaaaattctagctgtaatgtcatttctggtgaaaggaggtactttagtttgcgtgctgcaccatctgcttaagcattggatta

SEQ ID NO: 1944 - DNA, 350 bp, Gossypium hirsutum
  Clone ID: LIB3493-051-P1-M1-C12
ttgacatattgacagcatggggggactcgaagtggaggaaatttctacctcaacagcttctttggagaggcttccagggaagtcaacctcatcatcccctgcggttgccgccgatggttcaactcacgaatctttctcttattctaagcttcctgaagagaccctcaatctctccattcgcaaattggatggctcttcctttgttattgaagttttaaagtcggctaccgttgcatatctcaagctgggagtccagaatgtcttttgtcatatgccagactaaggtcctgacaagatttcatggtgaccttttttgggacactttttctttccttatcgtcatttgaaac

SEQ ID NO: 1945 - DNA, 513 bp, Gossypium hirsutum
  Clone ID: LIB3493-051-P1-M1-C2
gtgaatttactgattctcagattgtggtgatgctgggtgagaatggtactgggaagaccacatttattcgtatgctggctggtttgttgaaacctgataacgtagaaggttcagatgtggagatacctgagtttaatgtttcatacaaacctcaaaagatcagtcccaaatttcaatctactgtccggcacttgctgcatcaaaagatacgtgattcatacatgcacccccagtttgtttcagatgtgatgaagcctcttctcattgagcaattaatggatcaggaagtggttaatctctctggaggagagctgcaaagagttgcattatgcttatgtcttggaaagccagcagatatttatctgatagatgaaccaagtgcttatcttgacttcgaggcagggtattggtgctcttaaagtcataaagaggtttatccttcatgcaaagaaaactgcgtttgtggtcgagcatgattttataatggcgacttacctcgcagatagagttatt

SEQ ID NO: 1946 - DNA, 352 bp, Gossypium hirsutum
  Clone ID: LIB3493-051-P1-M1-C3
gtcaaacaatgtatacacccaggcgagagacgtctaatatttgctggaaaacaactaaaagaccgtcaaacatatacctactacaacattcagaaggagtaaactatccatcttggccttccattgcactgctgaatgcaaatcttcgttaagacccttacctgacagacaatcactatcaaggtctagagctctgacacgatctacaacctgaaagccaaaatccaaaacaaggaaggcatcccctcagaccagcaacctctcatcttctccggaaagcaactctaggacgggcggactttaaccgattacaatatccacaaggaatcgactctttatatagttctacgtc

SEQ ID NO: 1947 - DNA, 366 bp, Gossypium hirsutum
  unsure (1)..(366): unsure at all n locations; Clone ID: LIB3493-051-P1-M1-C4
taagagagatggcgtctntaataagatcggcgatcttaattctggcggtgtttttatctgtacgcttcaattcgggtgttaggttgctccaggaacagcccaatgatgacccggggaacatggacgctattcctcccattgatgcactcaaccctaccgagttgaatggacccggtgttggcattcacgaagatcatgttgtcccaaaaggtgctgaaattggtactcttggttttggttttgaaggtggtcctgataaatgttgttcttctggatgttccggtaattggaatcctggtgggttccttctaccatttcctcaaattccagaaatcccaagaatttcagaaatcccacaaatcccac

SEQ ID NO: 1948 - DNA, 317 bp, Gossypium hirsutum
  unsure (1)..(317): unsure at all n locations; Clone ID: LIB3493-051-P1-M1-C5
gggcttctgggatctcaactacggtgatccaaggtttgttggatatgttggtggaggggggtccanacaatgtcaaccagtgtttccttgaagcctctcgattcggcagtacagaacttgttcgcattttattgcagattgcccaacaaaatagcttggatgttgatgttgatcttgccttgggttttgcctcgcattactgcaagattgggacaatggagtgtctagtggaagagggtaatgctatggcgtntttgggccctttaatgagagcagctgaaagaggatgcatgcatgttgtccagttgttttttaaa

SEQ ID NO: 1949 - DNA, 396 bp, Gossypium hirsutum
  unsure (1)..(396): unsure at all n locations; Clone ID: LIB3493-051-P1-M1-C6
cggcagcctgccanccatccagcgagggagggatctagcgagcgagctatctctanagggtctgcaaattttagggttttggattgggaaggtcangtcagtgagcgccaaaaagaggagaaaattttcttatacgttctgttaataactaccacaattgatcttctgttttgagaattgaaatttctttttacaaaaaaaaagtggtgaatttgatttcggttttggtgatgattatgtgtgagaaagagcgtgtgcttattgtatgcaggaagagaaagagccagagacagagtgtgagagatttttttaagagaggatttgtgagatctttttttttgagtgaattatggatttcaacgcttttcatttctcaactcaatttatcctttttac

SEQ ID NO: 1950 - DNA, 311 bp, Gossypium hirsutum
  Clone ID: LIB3493-051-P1-M1-C8
atcatttttttccaaactgaatatgctttgacatgcgtcaaacaatacttgaagggcagagatggttttgggtttgtaccattcacatccagaattcggctgctggctttctggtgtcgacataaacacacattatatttttgaagctttgaatcaaagggctgtagcattggtggtggacccaattcatagtgttaaggggaaggtggtaattgatgcatttctttttatcaatccacaaaccattattctttgccaataaccacttcagacaacttcaaatctatttcatcttaataagccatctattc

SEQ ID NO: 1951 - DNA, 201 bp, Gossypium hirsutum
  unsure (1)..(201): unsure at all n locations; Clone ID: LIB3493-051-P1-M1-C9
ctttatatggccttctnctggccggatnatncctaatatggcaacatcttcatntnaanctnatntnccctcaattccattanggnactcctcattccanaatcctctggatgggtncattcaatactcttcanancttcanaacaaanggcaangtnacccacctaccccaacttcaacattttgcaanggttataaatc

SEQ ID NO: 1952 - DNA, 600 bp, Gossypium hirsutum
  Clone ID: LIB3493-051-P1-M1-D1
cttgtcacacgagtgagacattatgggcgcaaccactcgttgactaccgggatactcgatgatcgcttaaatctcgacgatagaagaattgttgatcacatgattaccgtcttgaaaattgctttaatatgcaccagcctgtctcctttcgatcggccatctatgcgtgaagttgtgacaatgctgatagaatctaaaaggcaagatcaagaagacaactttgggaagtctcccacttgcagtcctcccaaacgcagtgcctcgtgaaagtacgtcactagctactccctgttttcattaaccaagatgattcttttgccattgatttttctgttctatttttgccgaaagataaaataggacatatacatttttcgataaagaaaatgtgatactgaaagcctctgttgatagctaatggaagtaaccgatgacactgtaggagtctataggaaatacgatatcgaacaccggtgtacatacgtgaattagattcttttgaaatatcgcagctgtgcttaggtcactcatccggagcatcgtttattcgatcccgtgttgaaaataaactgttattttagttgattccaaatgttttac

SEQ ID NO: 1953 - DNA, 361 bp, Gossypium hirsutum
  unsure (1)..(361): unsure at all n locations; Clone ID: LIB3493-051-P1-M1-D10
gtcgtgttcaacanttgcggttgggacaattagacagacacaaangaaacananaactaaactatngcttccatgtctttctctgcaactattccggctcctcttcttggtttttcccaaaccaaaaagaacccagttttttcttcatcatggccttccatgtctttctcaattccttccatcaaatcctcgcttgggtcttcaaaatcaccctttttccaaaatggggtctccttgccatcgcttactggttctggggttgtctttaactctagatcttcaggcatttatgcaagagcagctacggataaaaccctatacgactacacagtaaaggatattgatgggaaggatacccctc

SEQ ID NO: 1954 - DNA, 388 bp, Gossypium hirsutum
  unsure (1)..(388): unsure at all n locations; Clone ID: LIB3493-051-P1-M1-D11
gctatttgggagaattttnggtggggggggctggaataacaggtgcagatcttcagggtgacatgaactgtgccgagggttatgtgaaggatatgtgcaattgggtggttggtagatgccttgacgatatgctattcatgggtaaaaggtatgataaagggtggattggtcgggtgagaatgggtggttcaattccctttggacgggtatcatacacagaagcagtggagcttttataggaaggtgtgagaggtggtaagaaatttgagaatgaagtggagtgggggattggtttggcttctgagcatgaaagatacttgactggagttaaatttcagaagcccggtattggttataactaccctaagggaataaaaacattctacat

SEQ ID NO: 1955 - DNA, 542 bp, Gossypium hirsutum
  unsure (1)..(542): unsure at all n locations; Clone ID: LIB3493-051-P1-M1-D2
gaatatcttcctcccctccaccatgttgtttctccttattccggtttcatcttccttcttcttcttcatccaattcccttcttcatctgttctgtaagttttttatgctttttattttctgtatttcaggcgatgtgttgattgcaaaaatgtagggaagtctttcggctctgtttcatgctcgatttgcctcgaaacggttactgataatggggatcagtcgtgggctaagcttcaatgtgggcatcaatttcatttgatgcattggcctgagagctctggttttggtgatgcaactgatccgcctttgaagtctgggagtgagcataggcagtttctgaatcgcctcaagaaggtatggaaggccatggaaggcctagtcgattctggtttagttcaagctatcngtgttagcaatttcggtgttcatcagatcaaagaattgattaaattcgcaaaaatcgtacttgctgttaatcaggtggagttgcatcctttttggaggcaagatgagctggtgaagttctgccaaatgaagtgta

SEQ ID NO: 1956 - DNA, 541 bp, Gossypium hirsutum
  unsure (1)..(541): unsure at all n locations; Clone ID: LIB3493-051-P1-M1-D3
tgttgttgttacttatggctactgcaagcgtggagcatcctcaggttcaagtactctgagaagctcgagttcatcggaggattttcagccgattttggatgaaaggaagcgcaggagaatgctatccaatagggaatctgcacgtcgctctcggatgcgtaaacagaagcacctggatgaactgatggcccaagtttctaatctcaccaaccacaataaccagatccacacaagcatcaatgtcaccacgcagctttactccaacgttgaggctgagaacttggttcttagagctcagatgactgagctcagcaacaggttgcaatctctcaatgaaatcattcatttcataaactccagcaatggggttctccaaaatgacactaacttttgaccaggccggcctactgtcatcctcatcatcagctcaatgatgatagtttaatgaatccatggaatttttccacaaccaatcaaccctgtatgccttctgctgacatgatgatgtattgattgattaatcangtctttgcagtgtacc

SEQ ID NO: 1957 - DNA, 525 bp, Gossypium hirsutum
  unsure (1)..(525): unsure at all n locations; Clone ID: LIB3493-051-P1-M1-D4
gcgcccacgcgtgcgctcgacttggtgaaggtgaatcatggacaaagaatattttttaaccaaagtcttgtcctgttggtcaagttttatacgaagagtagtgttttgtgttctttgagtcggtccgatccccacgcacatcgcggtgattatggacgaaaatcgaagatacgccaaaagaaaactattagaagaaggggctggccacgatgcgggcgctatggcgctgttgaaattgatcatttattgctatgaactcggagtgaaatacattaccgcttatgctttttccatcgataattttcgaagaaagccaagtgaagtgcaaaaaataatggatttgttgaaggaatgtatgacggtgttggccaagattacgaagcatcatccgatcaaagttaattttgctggaaacctcgagcttttgaatgcagaacttatggatgaagcttgtaaactcatgggagcaaccgcccagtattccaaatttcgtgtcactatttgngtatgctattggtgcactga

SEQ ID NO: 1958 - DNA, 588 bp, Gossypium hirsutum
  unsure (1)..(588): unsure at all n locations; Clone ID: LIB3493-051-P1-M1-D5
cagagatcgactccaatcctagcgttggcgatnaaaaagagaaactaangatcttcccttatcatgatttcaccgagagttcccatggctgcaatctctgccccccaaatatgtgcaaagggagggtgattgaaaggattcaagcttctttagaagggaagaagaaaatcatataccttggagatggcagcggagattactgcccaggcttaaagcttggagaggcagactacatgatgccaaggaagaattatccagtttgggatttaatttgcaggaacccaatgttgatcaaggctgagatctatgaatggaccgatggtgaagagctagagaaggttttgctgcaactaatcaacattatttctcttgaagaagactatgccaattctttccaattcatctcncgttgactgcaaattgcagaccatgtctgcatccaaaaatcccttccctcatgccctcccngttcctcagtagatccattccatttctcatatatattagctgattggtccaaaccgttttcattgttccgctgcttgtttttcttttttctttttaaatattaattgtgtttttttagat

SEQ ID NO: 1959 - DNA, 536 bp, Gossypium hirsutum
  unsure (1)..(536): unsure at all n locations; Clone ID: LIB3493-051-P1-M1-D6
gcttcttttaatccccctttatggccgggacagcaccccaaatctttttantttcaatccacaactgaactagaanggctatacaaacaaacaaattctgggtaagagtgtgctactcctgctcccaccatgtctaattcggagggtggtgccaccaacggagctataatggaccctcagagacagcaagccacgggtaatggttcccttgccataaaaaaacctccttctaaagaccgtcacagcaaagtcgacggtcgtggccgaagaatcaggatgcctatcatttgtgccgctcgtgttttccagttgactcgtgagttgggtcacaaatccgatggtcagacaatcgagtggctcttacgccaggctgaaccttccatcattgccggcactggcaccgggactactgccggcagctttttcaccatgtctgttttcgtccgtggcggagctaattctacttttctatcgtccaccactggttcttcctctttggatcataagccctttgtggggtcccaccccatttatac

SEQ ID NO: 1960 - DNA, 338 bp, Gossypium hirsutum
  unsure (1)..(338): unsure at all n locations; Clone ID: LIB3493-051-P1-M1-D7
ccaaaataacataaaataggattgtggaagagctaaagccagggcctncaatttgcttccctttcactccattaggcttcttagaaagggcggccaccgtctacggcgaggggcctccatcatctacaataacacttccttcacctggtcccaaacccaccggcgatgcctccagctagcttcttccctctcctccatcggtatcggcagcggtcacgtcgtctccgttttagcctacaacatccccgccatgtacgagattcaattcggcgttcccatgtctggtgctattcttaactgcatcaacacccgtctcgacgctcgcacagtctccgttc

SEQ ID NO: 1961 - DNA, 374 bp, Gossypium hirsutum
  unsure (1)..(374): unsure at all n locations; Clone ID: LIB3493-051-P1-M1-D8
tacggctccnatcgactcggtgggctcgactccttcaagagctactctgaaaactacaacgttgtcgttgactcttttcgtcgctacagccgggactccgcgggtcacaaggaccaattctccaattacgccagtgcatcaaatgtcgtcgaccagagcttcaacacctactgcggagccgccactggtggttccgggaacttcaacaactacaaccatgaagtcaacgtccctaacctccgattcacttcgtattcggatgattctaacgggcatgggcagacattcacgcactacacagtggagaccaacgccgggcagcagtcattttcaaattacggcaaaaactgtaatggcgtccctaacgactttac

SEQ ID NO: 1962 - DNA, 357 bp, Gossypium hirsutum
  unsure (1)..(357): unsure at all n locations; Clone ID: LIB3493-051-P1-M1-D9
ggggtgtggacaattaccgtgcggagtgcattgagactggttctatcnaacctctctaccatgtctggttcggtgggatgatcttttcttaccttggtgctcttcccagcgagcggcgccacctcgagcacaagcagcatgctgagcaacacgggcatcattaatcccatctagctttaaagatgggtcggatcgctggtgtgcccttctcagttttatccggtaacaattcgatttgcttaatgctttttggttggaatttgtgaacaatgtangcagaggaagatgctgtcttgatcaaatgcaaaaataaaagagtacaattttctttaaaataagtgaaagactattagacta

SEQ ID NO: 1963 - DNA, 602 bp, Gossypium hirsutum
  unsure (1)..(602): unsure at all n locations; Clone ID: LIB3493-051-P1-M1-E1
cgaagtttccatagccgaagctgcaggtgaagtcgataccaaagaagtggtagaagaagaagcgaaggctactgaggaatcggagaaagcaaaggaggaggtaaaggatgagaccccggaggtgcagacagaaacagttacagaggaggccaaagtagagaccgaggaacccgcggtggaagcagcggtggaggagaaaccagcggaggaggaaaagggagatgaaaaagctgaagagattcctgttgagaaagttgaagaatagagcgaccaataccatacgtaaggtggcaaaagcttaaaggagcttcttttttctataggctgtatgtcatagttggcggagtcatactactattatttatgattactatgtcggatgtgggatgatgagggctttcttttttctttaatggttgtttttctgctttggggtttgatatttagtattgaaccttcctttggtccaggggtcaacatgctgatggaagaanactataggtttccattttggagtggtatggatgtatgtatgcatgtgtgcatgcatgcacccccgtattggttttggtcccaagagagtctatatgatgagtttgata

SEQ ID NO: 1964 - DNA, 322 bp, Gossypium hirsutum
  unsure (1)..(322): unsure at all n locations; Clone ID: LIB3493-051-P1-M1-E10
cttctgcgagcactgtgctggaaggcatcatgcgaagaataagaagtgcttcntatgcaaccaacccacgcttggcattttcaatgcagctcatgagatacgtanaaagatggctgaagagggtaaactcaaaggccattgatgcttctgcttctgcttcaattcctgctgtcttttaacatttttgtttgttgtttagtgttgtagctgactatgttactcttgttagactcagtcttgggtttttatgacataaatatatatattttattttgaagattttcatgtatgtgaagaatctttgaagtacatttacatactc

SEQ ID NO: 1965 - DNA, 401 bp, Gossypium hirsutum
  unsure (1)..(401): unsure at all n locations; Clone ID: LIB3493-051-P1-M1-E11
tgagccacaaaatcctnagncagacgaggatgatagatatgtggtttcntatgtccacaatgaaaacacaggagagtcaaggttcctggtgatggacgcacaatcacccaatcttgacattgtggcagccgtgaagctgccccgtagggttccctactgttttcatggactatttgtgagggaaagtgatctaaataagctgtagaagtagattcacttcctctcggtcgggttcaggtggatgatcattcattaaacacatataatagcagtgaataccatagcagatgaaagttacaaggcgtttacaacatattgtataaacatatagtattttgttacacatgattgaagtcccaatatcataatcattgcatgtaatcccttttatttaccattta

SEQ ID NO: 1966 - DNA, 387 bp, Gossypium hirsutum
  Clone ID: LIB3493-051-P1-M1-E2
ggtaaaaggaaattcgatggtgggtatgttcataacggactcttgaaggctgcctgatgggttttagatgcagagtgcgaagttttgaaggaactcgtcgaggagcacccaaattatactttgacatttgcaggacattctctcgggtcaggtgtagcagccatgttagctttggtggttgtccagcatcaggataaacttggaaacattgacaggagtaggatcaggtgctatgctatcgcgcctgctaggtgtatgtcactgaatttagcggtcagatacgcagatgtcattaattctgtcgttcttcaggatgatttcttgccacgaacagccacgccgttagaagacattttcaagtcacttttctgtttgccatgcctacta

SEQ ID NO: 1967 - DNA, 611 bp, Gossypium hirsutum
  Clone ID: LIB3493-051-P1-M1-E3
ctagtcttgtcttcttccctattgcccgccatttaaattagcagcctctcaatacaaaagcttcctatcatatcatgttcttcttctcctctcaaaagctttctgtatttccagccaaaacttctcatttttatcactgaattatacgtatacatatacatatatagagatttgaaggttcatcaatggagagcacggactcttcgattggctcgcagcagcctaacctaccaccagggttcaggttccaccctacagatgaggaactagtggttcactatctcaagaaaaaggctagctcagctcctttgcctgttgcgatcattgctgaggttgatttatacaagtttgatccatgggagttaccagcaaaggcgacatttggtgagcaagaaatgtatttttttaagtcccagaaaccgaaagtatccgaacggagttcggccaaacagagcggcgacttcgggttattggaaagctaccggaaccgataagccggtattaacatccggtgggactcaaaaggttggtgtgaagaaagcactggttttctatggagggaagccacctaaagggattaaaactaagtggattatgcacgaatataggct

SEQ ID NO: 1968 - DNA, 329 bp, Gossypium hirsutum
  Clone ID: LIB3493-051-P1-M1-E4
tgacacatctcatcatgattatcggcgggagcccaacttaactgatgctacaatcacctaatattaaccaactgaacctgcacacgatatacactatatacttgaaataacaattgcctgatatgacttgatcaatattgaccaaaaatttagaagacaacacattaaagatgtcacttctacacctaactgaacttgtagatgttatgatctcatcatctcacattgcattatctgataaccatgaaacttacaatgtccaactatttaaatcaatagataagatatctgatttatgatatcatgagacacacaccatatgcttatca

SEQ ID NO: 1969 - DNA, 559 bp, Gossypium hirsutum
  unsure (1)..(559): unsure at all n locations; Clone ID: LIB3493-051-P1-M1-E5
ggaggccaaagcatcaacaaaaggtttgacaaaaccctagtctctaactacttctttgttttgcctaagccatgtcgaggagaaaggttagagagcccaaggaggagaatactaacctaggacctgctgttctagagggcgagcatgtttttggggtggctcacatctttgcttcatttaatgacacattcattcatgtgactgatttgtctggaagggaaacaatggttcgcattactggtggcatgaaggtgaaagctgatagggatgagtcttccccttatgcagccatgcttgcagcccaagatgtttctcaacgctgcaaggagttgggtattactgcccttcatataaagctaagagctactggagggaataagaccaagacaccagngtcctgtgcacagtcagcacttagagcccttgctcgttcaggcatgaaaattggacgcatagaggatgttactcccattcccactgacagtacccgtagaaagggaggcagacttgggagaaggctttgattcttttctttcgtatcttgtgctcacctgttgct

SEQ ID NO: 1970 - DNA, 523 bp, Gossypium hirsutum
  unsure (1)..(523): unsure at all n locations; Clone ID: LIB3493-051-P1-M1-E6
gttttgcctcgttctaagatggtggatgctgatttgggtaggatcattaactccgatgaggtacaatcagtggtgaagcctattaagaaggagatcaaaagggcacctttgaagaagaatccaatgaagaacttgaatgctatgctgaagttgaacccttatgctaagactgctaggaggatgtctcttttggctgaggcacaacgcgttaaggctaagaaggagaagcttgacaagaagaggaagcccatttctaaggaggaggcaaccgcaatcaagtcggcaggcaaagcatggtatcaaactatgatctcagacagtgattacaccgagttcgagaacttcttaaaatggtttggcgtatctcagtaatttagttcttccttaagaaattatggcagacaatcatttttatcagttnttgtttaatgtttttgacatgttatatgttgatggcccttttggatagtttcatttattttgaagacaaggataaaaaaatttttcttccattcttctttta

SEQ ID NO: 1971 - DNA, 533 bp, Gossypium hirsutum
  Clone ID: LIB3493-051-P1-M1-E7
cccaagatctgtaaacccaggtgggggtgcattctgccctctgcaatacccttcaggggaattgaagctgttgatacagtgatgtcaccgcagtcggcttttgagaactccggtcctgccgtggcacatctcattatgattatttacaatggcaaccttgagactctgaaaacaaatagggagacttatgcactctcacaaaccaaatagagaaggttgtgacctaatgtttgggagcatcttgataagcttgaagtaaatggaaagcaagtgattgcatgcaaatattgtcacaaggtgttaatagggccaagcaaaagtggaaccacacttgaaaaaccatttgaaaagatgcttagaaaagaaaaaaaaacaaaattaatgaaatgatgaagctgttattttccggctcatgcttaatgaatgggggctcaatgttttggtagtaaatgagttacctggattttacttaaatgatcattaagcatcgatattcatagatattggtgaacaaagaggctttcaattttttt

SEQ ID NO: 1972 - DNA, 397 bp, Gossypium hirsutum
  Clone ID: LIB3493-051-P1-M1-E8
caatgtcgtatcaacatctgcgggagaagcagcaactgcagttgttcttcaagcggatagggaattgcagccatggattgccaaaaatgatgatcaaggtcagaagatgtggagaatcaaccagcggattgtaaagttgatagtggaactaatgagaaatcatgatatcccggaatcattggtaattgtagcaagtgcctctgatttgcttctacgtgccactgatggaatgctcgtagatggggaagcttgcactttaccacaactcgagctgttggaagcaacagctagagcagttcagccagtactagagtggggggaatcaggactggctgttgtggatggactttcaaacctgttaaagtgtcgtctgccagctacaactcgatgtctttct

SEQ ID NO: 1973 - DNA, 304 bp, Gossypium hirsutum
  unsure (1)..(304): unsure at all n locations; Clone ID: LIB3493-051-P1-M1-E9
gttgaaggtccttacaagggtcggcattacaggtactgagagaagagttgatgagtttttatcaagaaagaaaaaacatccggatggtttgattgtttcttgttttactgaaatttcatgatggttaggtttttgttttatttttagagtttttttttgtgtttgggtgatgggaaagtgcctgggggtgggaaaatgatgtgggatttggtatcttcttgtatgaagatgaccaaatgggtttgaaataaaaatgttagggatgtgtggaagatttntaaaaaaataataaatttttataaaa

SEQ ID NO: 1974 - DNA, 569 bp, Gossypium hirsutum
  unsure (1)..(569): unsure at all n locations; Clone ID: LIB3493-051-P1-M1-F1
ataaattcataggccaccatgactcgggcgttcaactttctacccatgctcctcttgcttactttatcagccctgactgtccaagaaatttcagctgcaccttcctgcactgaagttgccatagaattactcccatgcctcagcttcctgtctggcaacggtgctgcagatgttccatcgcgggcatgttgtttgggtgctcaaactattgcttacgaagcacagaccaaagatgaccgacgggctatctgcgagtgccttgttaatgcattagcaaatattggcacatctgactccttcactgcgcggatacctttaattgctacccaatgcggtgttgaagtttctcttccgccaattaccggcgacaaagattattgttccaagctcttcccttgacttcgtttgatataccatcgtgttgtgccacactagggaagatattaattatatctagctcaatccatcaccctntaaatttctttaagtaatttacattgtacttagtgaataacaaatcctagttgtggacaaataagatcatacatgacgttaatgtgaaatcatac

SEQ ID NO: 1975 - DNA, 567 bp, Gossypium hirsutum
  Clone ID: LIB3493-051-P1-M1-F10
cttctctagaggtctggtggcgtgagacactctctcctgcctcttagcaaccaaagactcagatccgctcggatttctttgtcccagaactagaatggagacctttctattcacatcagagtccgtaaacgagggacaccctgacaagctttgcgaccaggtctctgatgctgttctcgatgcctgccttgcccaggaccctgacagcaaggttgcctgtgaaacatgcacgaagactaacatggtcatggtctttggagagattaccaccaaagccaacgtagactatgagaagattgttcgtgatacatgccgctccattggatttgtttctgatgatgttggtcttgatgctgacaattgcaaggtcttggttaacattgagcagcagagccctgatattgcccagggtgtcacggacactttacaaagcgttcagaaaaggatggagccggggaccagggtcatatgtttgggtatgccactgatgaaacccctgaattcatgccttttagccatgtccttgcaactaagctcggtgcacgtcttactgatgttaggaagaat

SEQ ID NO: 1976 - DNA, 442 bp, Gossypium hirsutum
  unsure (1)..(442): unsure at all n locations; Clone ID: LIB3493-051-P1-M1-F11
agaaaagaaaaatggttctggtagagaaactttgggatgatgtagtggccggacctcaaccggaacgtggccttggccggctgaggaagatcacaaccaccccacccttgtccaccaaagatgaggcttcatcaatggcgatgccgacgagtccgacgacacctgggacaccgtcgacgccggtgtcggctcgtagggacaacgtgtggaggagcgtgttcaatccaggtagcaaccttgcaaccaaaggtattggcgctgaagttttcgacaagcctcaacctaactctcctactgtttatgactggctttacagcggggagacccggagcaagcatcaccgctgattgggcgatggctgactgcggccgagggtagcaaaaccactagcagaaggttgctgctactgaaggagcangattttgcatgttaatatatatat

SEQ ID NO: 1977 - DNA, 342 bp, Gossypium hirsutum
  unsure (1)..(342): unsure at all n locations; Clone ID: LIB3493-051-P1-M1-F2
ttcttcttggttccaacactgtaggtggtncttttaacggcaacatttattaccttattatgaaagcaaagggtttcccttacttagaagttcatgtcgaaccttatatgagacaactcacggttgcagatgttgtcactggccctcttcaagtctgtcatggaaactagaaggttggtaatatcgtacacatcctcaagaccacaaatcatcaatggtttccggttatcaacgaacctccacattctaaatccccaatttttgatagtttaatcctccatgctcatcttattacactgctaaagaagagagttttgtttcacacccctattctaataagtt

SEQ ID NO: 1978 - DNA, 645 bp, Gossypium hirsutum
  Clone ID: LIB3493-051-P1-M1-F3
gtctcaagtcaagctccccatgtggatgctctcctccttatctttcctgttttctctgtttttctctctcaaatgcggatagaagctaatagaaattagctttttcactcatgggctctgtcactgtaaaaccctcattaaatactttctgttttattcccaagagtcccaaaattcgttgtcattcgcctcacttctcattcctcaaactcagaccttcccttgtttctttcccctttaaatctccttctgatccaataaactcatatcccaaatgtaaaattcgaagctttatggttaaccctttattggttttagtcccagttttgagaagcatcagaggcttggctttttcgcattcccaaaaatgggcttcacgtttgcacgattgcattacagaatcggaagaaatttagaccaatacaatggcaattatttgcaaagtggaggtcttgggatggctttattgagtgtaacagctagcgctaaagttcggattagtccattcgtggcgacattggcggcgaatcccacgtttgtttctggtttgttgcattgttcattgctcaatcgatgaagattttttaaatttctttatagagcggaaatggggattcccgatattgttgctttctgtgggatgcc

SEQ ID NO: 1979 - DNA, 539 bp, Gossypium hirsutum
  Clone ID: LIB3493-051-P1-M1-F4
gtcaggggtcttgtctttgagggtggtgacactcttcaagccttgtctgacacaatctctgatgcctgcatttgccttcaagagaacaacataccatataatgtcctcatctccgattgtggaaagcggatctttctccttccacagtgttatgctgagaaacaagctctcggggaagtgagtcctgagcttctggacacccatgtgaacccagctgtgtgggaaattagtgggcatatggtgttaaaaaggaggaaggactatgatgaggcgtctgatgaaaatgcttggaggctcctggctgaggtttctctctctgatgagaggttcctggaagtgaatgcactcattctttaagtcattgccagtggctaagattgcatttaacatgatgctaagaattttcctaatgagccccatcctaaaccttaatccacttaagaataaagcaccatcaccaaaacctcccaccgcgctatggtgggtgggacacaagaattctttgtcttcagtatgaacttgcattccacaaacataac

SEQ ID NO: 1980 - DNA, 360 bp, Gossypium hirsutum
  Clone ID: LIB3493-051-P1-M1-F5
aaatgagattattcagttgcccatggaggctgatagaataaggattgacagcaaggcacgcatgcatgcaaatgcagcacgacgcaggtaaccgaacagcatgctggctggtgtgtagttgattctattgaggtattggatgcttgggtgtgcctttgattgcatgcgtggtccaagtttctgttggtttcaacttgagagttatgtgcatacctaagctggtgagggcatcatgtaattagctatctctcctgttagtcttgtagggtgagttgtatgatcctgggtggtacattagttgaatagttgggccacattcaggttggaaactattttttttacagttcgtcagatgaagag

SEQ ID NO: 1981 - DNA, 561 bp, Gossypium hirsutum
  Clone ID: LIB3493-051-P1-M1-F6
gttttagtcacgatataagcaaaggggctgataatccaccgaagaatttaggtcaccgccgtgcccattccgaaatcataactcttcctgatgatattaacttcgacggtgatctcggcgtcgttggggcagccgacgggccttcctattccgatgaaacggaggacgatatgttgtctatgtatctcgatatcgataagttcaattcttcttccgtcacctcaatgtttcaggttggcaagtcgttgacaacgactgctccaaattctggtccatcggctgcggtgagtatgggagcagggactgcaacgtccggtgaggaaaatgcgagtgttggtgttgggtcttctgagaagcctagaattaggcaccaacatagccagtcgatggatgggtcgacaagtattaagcccgaaatgctcctctcttgttcggatggaggtacctcctgctgattctaagaaagcaatgtcccctgctaagcttgctgagcttgctcttattgatcccaagcgtgcttagaggatctgggcgaataagcagtctgctgcgaggtcaaag

SEQ ID NO: 1982 - DNA, 539 bp, Gossypium hirsutum
  unsure (1)..(539): unsure at all n locations; Clone ID: LIB3493-051-P1-M1-F7
gcttctttctatctatatccttggctgctttcaaagatggcaggaatcgcctttggtcgcttcgatgattccttcagtttggggtctgtcaaggcctaccttgctgagtttatctcaactttggtgtttgttttcgccggcgttggctctgccattgcttacaacaagttgacaactgatgcagccctagatcccgatgggctagtcgccattgctgtttgccacggatttgctctctttgttgcagtggctatcggtgccaacatctcaggtggccatgtcaaccctgcagtaacttttgggttagctcttggtggccaaatcaccatactcactggcatcttttactggattgcccaacttcttggatccatttgtgcttgcttcttgctcaaggctgtcacttggggtttgacagttcctatccacggtcttggagcttgagttggagctattcaaggagtgccgatggagatcatcatcacattttcattggtttacacagngtatgcaaccgcagctgacccaaagaagggatc

SEQ ID NO: 1983 - DNA, 122 bp, Gossypium hirsutum
  Clone ID: LIB3493-051-P1-M1-F8
cgttcggcaaccaaatttacagaataattttacttcacggcaatgaactagaattttaacaaggatgaagtttgtggtcatcttttaataattatcctttcttattaattatctctttattt

SEQ ID NO: 1984 - DNA, 351 bp, Gossypium hirsutum
  unsure (1)..(351): unsure at all n locations; Clone ID: LIB3493-051-P1-M1-F9
tcaacctttcttncttccagaagggtggcanttntaacaggagcaaacaanggaatctgttttgaactatgcaggaacctctcttcaaaagggatcatggttggtttgacttctagagatgagaaaaggggacttggagcttttgcaaaattgaaagattctggtttggctcatcatttagttttccatcaacttgatgtgacgggcccttctagcattggctcccttggtgattatgtcaaatctaaatttggaaaacttgatctcttggttaataatgctggaacttttngagctattctacatcaacaagcttttgtcaaagctactgaacttgctggatactttcca

SEQ ID NO: 1985 - DNA, 578 bp, Gossypium hirsutum
  unsure (1)..(578): unsure at all n locations; Clone ID: LIB3493-051-P1-M1-G1
ttgctacaacaggtttcaccctggaagaggtgaaaccaaaaccattaccgcccccacatcatggggcggtcgcttttggggtagaacccattgttcgcaagattccgacggaaaattctcatgtctcaccggtgattgtggctccgggaagcttgaatgttctgggaatggggctgctccgcctgccactttggctgaatttactttggacggtgctggtgggcttgatttctttgatgtgagtttggtggacggttacaacattcctatgttagtggttcctcagggtggcaaaggtcaaaattgtagcagcaccggctgcgttgaggatctcaatggcttgtgtccttcggagcttangataatgagcagtaacggcaggggtggcatcgcatgcaagagtgcttgcgaggccttcccccagcctcagtactgttgcaacggcccgtatgccacacccgatacttgcaagccttcttactactcccaagtctttaaaaaagcttgcccacacgcctacagctattcctatgatgataaaacctgcaccttcacatgtgccaatgctgcccattact

SEQ ID NO: 1986 - DNA, 506 bp, Gossypium hirsutum
  Clone ID: LIB3493-051-P1-M1-G10
aagcaaaccctaaccctaagctgggttttcttcatctttttttttcctctcaatcgcgataatgtctcacttcggaaggtcaggcccgcccgacatcaccgacacctactcccttctcgtcctcaacattaccttccgcacgactgctgatgatttgtttccgctcttcgacaagtacgggaaggtcgtcgacatcttcattcccaaagatcgaaggactggtgattctcgaggctttgcatttgtgcgctacaagtatgccgatgaggctcagaaagctgtagataggctcgatgggagagttgttgatggtcgggagataactgttcagtttgcaaaatatgggcctaatgcagagagaattcagaaaggaaggattattgaatcatttccaaagtcaagaagccgcagtcctcgcagaatgcaccgcgatgaccatcattaagaaaggatagagaagagtcgagtagagttatacgattaacgtgatcgattctggaagacaa

SEQ ID NO: 1987 - DNA, 437 bp, Gossypium hirsutum
  Clone ID: LIB3493-051-P1-M1-G11
agccacagctcatttaagtgtgtggaataacccatttcaaagttggtaatggctttgcagactgctgctttggttccagctactttcaccctacctaaagagggaaaatcaagtccatctttcaaggattcaactttctttggggtctcactttctgaacatgccaaagctgatttcagctcttctgcattaagatgcaaggacaagcatggttgtttctactgttttttttccattgtagagggaattcaacccaagaaatggagctgtgagagccgaaacaacagctactgcaactccagcaatcagcagatctgcggtggatggcaagaaaactctaagaaagggtagtgttatcatcaccggtgcctcctccggattgggtttagccactgcttaagcccttgctgaaactgggaaatggcatattatcatgg

SEQ ID NO: 1988 - DNA, 475 bp, Gossypium hirsutum
  unsure (1)..(475): unsure at all n locations; Clone ID: LIB3493-051-P1-M1-G12
gaaaaatgtggcagctattgtgtggttcacgatcgcatctgggacattgagtattcaccacgacccattttattttgaggttgataaaggatggaataaaattccatgaaatcctccatattgtcattttgatctttgacaggatctgcaatttccatggtttgctgtagaaatctttagtttcgatatgtaaaattaaattgttaggatccaaggtagactcatgtaatagtttataggcgctcctaaaggaaaaatcccctgtcagctcccctctccaaacttgaaaatctttatgttccgtctacgccagtgggattttcaatattttctttgctacatccggttggaagatcatcacgaatggaaattttatcacctnttcccaccctccaacagagtcctttttcaagcagtcctttcgcagtccatacgctattctaggatttcttcatcatcatcatcaagggataga

SEQ ID NO: 1989 - DNA, 646 bp, Gossypium hirsutum
  Clone ID: LIB3493-051-P1-M1-G2
gagagatataggattgctgaagcgtgggattttgagataaaacgctgggctgcagggaaggaaggcaatatgcgtgcactgctttcatcaatggaacaggtactttggcctgaatgtggttgggagccagtttcattgactgatttgattacctctggctcagtcaaaaaagtttatagaaaggccacattatgtgtccaccctgataaggttcagcagaaaggtgccactcttgaacagaaatatattgctgaaaaggttttcgatattctcaaggaagcttggaacaagttcaacaaggaagaactttcttaaaacctgtaaagtataaatagctcatttgaagaatcgagctatttttaattgggaatggttccttcttgaaacagaaagtgcaagaacagccgtagcagtgttatgggttcgcaatgatgacacggtccaaactcacgggaacttttatcaaggaatgaggcgatttggtaaggagtaaattttttttggtttcgtgtatgactgtaaattaatatacgttaatcaggaagcaagtagatttcgcaaagtttacggaacctgcaccatgccatatgtttcatttatttttgcttttatagacttctcttctctctctctctctctctatata

SEQ ID NO: 1990 - DNA, 498 bp, Gossypium hirsutum
  unsure (1)..(498): unsure at all n locations; Clone ID: LIB3493-051-P1-M1-G3
cagtcacaaagttgcttttcgaaaaggagtgaaagcaggaaaaaaatcgattaagatatagaaagatggcggtgatgcagaagctgaaaatattcgtggtgcaagagccagttgtcgcagcttcttgcctcatcgctggttttggtctctttctaccagctgttgtaaggcccattctagattccttagaatcatcaaagcaagtccctcagcctgctttaagagatgtggttgctggtgtgactggtaaaaagcagggctaatgtgatttatgagttgggaagaagcagaaactcaaatgtagctagtaatcagcaacaaaataaacttgattttaaagttgaactcttgcgccttcaacttcatctttagcatgagaatttgagtgttaatttgtttttattttcagtggtggaggattactcanaaatcatggataattcatatcagactggaatttgatatcatctacttaatttgtttccctacaaaanaaaa

SEQ ID NO: 1991 - DNA, 492 bp, Gossypium hirsutum
  Clone ID: LIB3493-051-P1-M1-G5
cgatccgataatactagcgaacgctgcgcgatttgagccattttggttacttccaaaggtcaagcgtcaaggagttcatcgttttcgtttctcgaactgttgctaaacgtactccttctggtcagcgccaatccgttcagcacgaagagtataaggtacatgcttacaacagaaatggactttgtgccttgggatttatggatgatcattatccagttcgaagtgctttttcgcttctcaaccagattctagatgaacatcagaaaaattttggggagtcttggagaaatgcacaagctgatagcactcaaccttggccgtatctgaatgatgctttgatcaaatttcaggaccctgcagaggcggataaattattgaaaattcagagggagttggatgaaactaaaatcatccttcataaactattgatagtgtgcttgcacgaggtgagaggctggacagtttagttgagaagagttcagatcttagtgc

SEQ ID NO: 1992 - DNA, 488 bp, Gossypium hirsutum
  Clone ID: LIB3493-051-P1-M1-G6
atgaaatgaacccaaagatatcagagtgcgggatggctaaatttttcaagaaggatgaacttgaagcaaacaccggcagaattgttgggacatatggctatgttcctccggaatacgttaggaaaggaatatactcaaccaagtatgacgtttatagtttcggagttctacttttgcaaattatcagtggcaagaggaattccagtctgtatggatgccatgaaaacttgaatcttctagaatatgcatacgaattgtggaaacaaggtcgagaggcagagtttttcgatgcatcactggatgattcatcttcgtcatgtaagctcattagatgtatgcaattggcactgctatgtgtgcaggaaaatcctacagataggccgtcaatggtgaaaagttttactattctcaagaacgaaaacagtgctgcaatctctgtacctaagcagcctgcatattcaataacaagatacgaaaggaagggaaag

SEQ ID NO: 1993 - DNA, 369 bp, Gossypium hirsutum
  Clone ID: LIB3493-051-P1-M1-G7
gttcgtcaaatattcaagagtcggtcaaagatcatttcttatgtgaggagctttcttgacaatcttgatttcttggaggttgaaactcccatgatgaacatgattgctggaggtgcagctgcccgtccatttctaacccatcacaataaattaaatatgaagctttatattcttattgcaccccagttatatcttaaagtagcagtattttgtgtactatatcatctttattattttagaatacacattctaattgaggacacttattctacacacattttcttatttactatcactaaattctatatctcttttacttactctcattacatattttcactttatctctcttatttttcattaatattc

SEQ ID NO: 1994 - DNA, 599 bp, Gossypium hirsutum
  unsure (1)..(599): unsure at all n locations; Clone ID: LIB3493-051-P1-M1-G8
acaaaagcttcagaattgggatggagattctttctcaacgaccatcttctttctcaactttgaatcccaacgctccattgtttgttccgttagcgtatcggacggtggaggatttctctgatgagtggtgggctctcgtccaatcctccccgtgtttccgcgactactggtttcaagaacgtttccacgatccccaaaacgacgacgccgatcttctttttcccgacgatcttgatgccgtctttgacgattacgacgactttttcgttgaccctacctgtgaagggaaggaagaagatactcaaaaggaattggtacccgttggagcattcaaatggcggaaggggcgagttgtgagcgagtcaactaggtttcttgagaaagcgcccaagatcgtgaatgtgaaagtgagtcctaggaatattcaccaaccaaggtagatcgattcctgcagatttgaaatgggaggtctncttagagcccaaaaccgtcagctttaggtttatctgctgctacctgtaacttgnttttttttcttttcttttttgaatttgaaaatattgtgtcagagtttaggcctgtatctgtacttttttcat

SEQ ID NO: 1995 - DNA, 618 bp, Gossypium hirsutum
  Clone ID: LIB3493-051-P1-M1-G9
attttattccctagtcggcgaagccctatctaacgaaactcaaggatgtcgccagctgctgtggttgaagccgccaatcctgagactgagcaggttccttctactgaggaatccaagatagagcttcagagcgaggaggctgtggttgaagatgttaaagaagatgagaaagaacatgacgacgacgacgacgaggatgacgacgacgacgacgacgatgataaggaagatggtgcccaaggtgctaatggaagttcaaagcaaagcagaagtgagaagaagagtaggaaggccatgttaaagttaggcatgaagcctgttactggtgtaagcagggtcaccattaagagaacaaaaaatgtgctatttttcatctcgaaacctgatgttttcaagagcccaaattcagagacctatgtcattttcggtgaggctaagatagaggatttgagctctcagctccagacacaagctgcccagcagttcaagatgccagacattggttctttggcagctaagccagacacttttactgcagctgctgcaccggctgatgaggaagaggaagaagttgatgagactggtgtaaagcctatggacattgacttggtcatgaca

SEQ ID NO: 1996 - DNA, 632 bp, Gossypium hirsutum
  unsure (1)..(632): unsure at all n locations; Clone ID: LIB3493-051-P1-M1-H1
aaacgcccataatattacacgtctacttgcaaagcacccctctttgtccacattcaatcattacctcaccctcactcacttagctcccgagatcaaccgccgcaccaccatcactgtccttgccttagacaacgccgccatgtcttccctcttggataaaaacccttccatttacaccatcaagaacatcctttcccttcatgtcctccttgactactttggtgccaagaagcttcaccaaataaggaatggtactgcactagctgctactatgttccaagctactggtgtggctcctggggtttctgggtttgttaatataaccgattntaaaggtgggaaagttggttttggagctgaagacaatggtggaagtttgaattctttttttgttaaatctgtggaggaaccttccttacaatatatctgtgattcagatcagcaaggctttgccttctgttgtagctgaggctcctactccagggccaagtgagctgaatatcactggcattatgtcagcacatgggtgtaaagtgtttgctgatacccttttggctaacccttgagccatgagaacatatgaggataatgttaatggaggattgactgtgttctgccctatggatgatcca

SEQ ID NO: 1997 - DNA, 375 bp, Gossypium hirsutum
  Clone ID: LIB3493-051-P1-M1-H10
gttgagcttgccaaaatgcgaagagaaaaatacccagactacaatattcctactgagttcaaagatgcagatgaaaacttgggaaatgtggtcttcaattccaagaagctgttggatttggggtttcaatttaagtacagcttggaagacatgtttgtcggagctgtggagacatgtcatgaaaaagggttaattgcacctccaacaaagattgagaatgcaataaatggtgataccattgcttctattgagacaccaaccagtgttaaatgttagaacaatatctatctataccatggatgtatcaccattgtcatgttaagggctttggcgtctttttttcgaattaaaataaagattttcgtttggatcttc

SEQ ID NO: 1998 - DNA, 490 bp, Gossypium hirsutum
  Clone ID: LIB3493-051-P1-M1-H11
acctagttattgaatatggcagcagctatagatatgtataatagcaatagcaacagttcagttttctcagatccttttagtgcggagttgatgaaagcgcttgaaccttttatgaaaagtgcttcatctacctctcctttatcttcttcttcttcttattcacagtctaacctgtatcctgaattttgctccccatggagaacccatttgtgctcagaacaagggttctgtaactatcaaaacttgatgggttttgagcaaacaggttcaattgggctaaaccaactcaccccttctcaaatcctccaaatccaagctcaaatctatcaacagcaacagcagcagcaggaggttgcttccaagtctacgaccgcatccctaaaaaaccaaaggttcaactttctttccccaaaagctgtacccatgaaacatgtgtcttccacccctccaaagcctaccaagctgtacagaggggtgagacagaggcact

SEQ ID NO: 1999 - DNA, 387 bp, Gossypium hirsutum
  Clone ID: LIB3493-051-P1-M1-H12
gcttgttggaactggtatgggcgggcttactgtgttctctgatggtgttcaaaatctaatagagaagggtcatagaaaaataacaccatttttcattccttatgctataacaaacatgggatctgccttgcttgcaattgagcttggtttcatgggtcccaattattcgatttctaccgcttgtgcaacgtccaattattgcttctatgctgctgccaatcacatccgtcgaggtgaggctgatttgatgattgctggtggaactgaagctgcaattattcctattgggttggggggttttgtcgcctgtagggcattgtctcaaagaaacgaagatccacaaactgcttcaaggccatgggacaaagagcgggatggctttgttat

SEQ ID NO: 2000 - DNA, 417 bp, Gossypium hirsutum
  unsure (1)..(417): unsure at all n locations; Clone ID: LIB3493-051-P1-M1-H2
gtcagtggaatcatggttactctggggggtatggagttttacaggaaaagataatgagagtaccgtatggcctgaacaaggaatattttaagtactcattgtttctcgttttctgcaaccgcataacaacatctactgtctccaccgtttttttactggcaagtaataaagccttgtttcctgttgctccaatctataantactatctcatatcagcatcaaacatccttaccacaacatgtcattataaagccctaaattatattaattttcctattcataccctttctaantatactaaaataatacctattataatttataacacttttcattatacanaagacatataaagtatctaactatttaatcagcatttctaataacccttaatttattcaatatttatacttattt

SEQ ID NO: 2001 - DNA, 563 bp, Gossypium hirsutum
  Clone ID: LIB3493-051-P1-M1-H3
cattgttggaaccccaagaagtcgccataggttaacaattctacttttgaagtcaagtttagttgtgattgtgattcttgctcttactggttcattttggtggacactttccatttcaacatcatccagaggtcatatatttcatagttctaggagactccaagagcagcttgtttctgatttgtgggatataggggagctttcttttggtacttcaaggatgaaagaaatagaattttgtcctggagagttggagaactatattccctgctttaatgtttcggagaatcttgattcgggtttttcggatggcaatgagtatgatcgagtatgcagacaaaggtctagacaaaattgtctagttcttccacctatgaactataaaattcctcttaggtggccaactgggagagatatcatttgggttgcaaatgttaaaatcactggtcaagaggtgtttacttcaggcaagttaaccaagaggatgatgatgtttggaggagaacagatttccttccgttcagcatcactcatgtttgatggtgtggaagactattcccatc

SEQ ID NO: 2002 - DNA, 444 bp, Gossypium hirsutum
  Clone ID: LIB3493-051-P1-M1-H4
cggacgcgtgggcaagtatgagaatggtgttataacaccaaggccacctcctattcaatatggtagaaaccaaggcggtaggtttcgtcaacaaaatagaaaccctgaccaaccaagatatgatcgacaaggaaataccactccgaaccagcaagggaatgtaccttacaatcagcagggttttgtgcaagggggtggaaggaactataggcctccacaaaattacaggcagcagccgccaatgaataacagagattgtgctcctagaggccctgatccttcgcatcagagcagttacaaccaaggaaggcagggaagttataattcccaagaacgaagggaattcgttcaaggagagcagaggaattatatgcctcctgagcaaagggatttcagagtagatcataggaactatgcatcctcacaaggtgggaattatgggca

SEQ ID NO: 2003 - DNA, 507 bp, Gossypium hirsutum
  Clone ID: LIB3493-051-P1-M1-H5
tgaaattcgaaaaatggaagacgaatcgtcgcattcaattaagttggtgaacttcgtctccgagcaacagttagatgaagcaaaaagaactagaggtgaacgaattgaagatggcactgcccagagggataggcctctgtacgagattttgaaggaaaataaagacaagaaagatgcagagtttaatgaacggttcaaacataggccacccaaagctttggatgaagacgaaactgagtttcttgataaattggagatgtcaagaagggaatatgaacgacaagtggcggatgaggaagctgaacagttgcgaagtttccaagcagctgttgcagcacagtccaatgtcgtgcttgaactaaaagaaacaccacctgttcttgcaaaccaggaacaaaaaacagttgggaaagatgaatccagacactcggcctctaggtatgctcataaaagtgaagccacaagcaaaaagggcaaaaaccgagccggaagaaaaactcataagtg

SEQ ID NO: 2004 - DNA, 498 bp, Gossypium hirsutum
  Clone ID: LIB3493-051-P1-M1-H6
ctaatgaaatttgtttttctggaccacactttcatgtttcttttccaaattaagattttctttttcaaatgtaacacattaaattttgaaagccttcaaatcatttttcaaaatttccttttcactctcaaaaacatttttatttttttcaaagaaccattttctactttaagcttctaaataatttttttatgttttgaattcatgacctcaaattccaaagataactcattagaagtatattgtaactcactaaaagtatatgaatcaaaatcacattatttataagatacctgtcaaagctctcattagtggaagtgccactatcacttttagtggctaccagaactttattctttcccttttgcttcttcctcaaaagacaatcatacttattgtgccccaatgataactcttgaaaagagttatatttcaaacctctaatgttgatttaatgactatacttaagtagatatattttcatttaaggttattttt

SEQ ID NO: 2005 - DNA, 654 bp, Gossypium hirsutum
  Clone ID: LIB3493-051-P1-M1-H7
gaaagtttaaggagatggagagaggaacttcttggtactgttgatatgtctgcggtcggagagagtaaagagcctgaagttaagatattaagtctctcgatcgtatcccctggtagaccggacataattttaccaatcccatttgttacaaagcctaaaacttgtttgtttactctaaaagaaggaagtcgatttcgtctcaaattcactttcaatgtctccaacaatattgtctccggtcttaaatacataaacactgtttggaaaacaggtattctagtggacaacacaaagctaatgttggggacatttagtccacaaaaggaaccttatacatttgaattggaagaagaaactacaccttcaagcttgtttgctagaggctcatattctttaatgacccaatttgtatattattatgaaaaagtctatttggatgtgagttattacttttaaaatccacaaaaactggggttcacattctttaaggaaaattaaagggataaaaattcatttaatccactttcttattttatttacacttaatttatagattttttttcttttaaaaattctttataaatcctagtttatattaatatttgctaaccaaatatctattctcctacatatcataactttcaccattccttt

SEQ ID NO: 2006 - DNA, 384 bp, Gossypium hirsutum
  unsure (1)..(384): unsure at all n locations; Clone ID: LIB3493-051-P1-M1-H9
gtttgaaaccttcaatgctgggtggtatgtatgttgccattcaggctgttctttccctttatgctagtggtcgtacaactggtattgtgcttgattctggagatggtgtcagccacacagtccctatttacgagggatatgcacttccccatgcaatcttacgtcttgatcttgctggtcgtgacctcaccgatgccttaatgaagattttaactgaacgtggttattcattcaccacatcanctgagcgggaaattgtaagagacataaaagaaaagttggcatacattgccctcaattttaagcaaaatctataaacctccaataccaactcttcagtttagaataactatgaactgccttattggcaagtgatcaccatct

SEQ ID NO: 2007 - DNA, 450 bp, Gossypium hirsutum
  Clone ID: LIB3493-030-P1-M1-A1
ctcctctccataaatctctctctcaacgcagagcgagtaggcggagacttccaagaatctatcgcatcagctaatcacgctccaaagaatggatcaggttcaacacccatctgtcatgcagaaggtagcaggccagctccttcgttctagccattctcaagattttcaaggttataatgggtctttcaggagtcctgctctataccaaaggcgtgctgcatatggcaattactccaatgctgcactgcagtatcctgtccgggcttgtggagacctgtctatggttccatcaacagcttcagctatttgcgttcaagcccctgctgagaaaggatttgccagctttgccattgatttcctcatgggtggagtttctgctgctgtatcaaaaacagctgctgcaccaattgagcgtgttaagcttttgattcaagaccaagatgaaatgat

SEQ ID NO: 2008 - DNA, 409 bp, Gossypium hirsutum
  Clone ID: LIB3493-030-P1-M1-A10
aaagcaactatcaactacgtttacctcagatgtaaaacacctcgtctcagatccactaaattcaccatgtctactactttcagcggcgatgaaacggctcccttcttcggcttcctcggcgccgccgccgctctcgtcttctcctgtatgggagctgcatacgggacggctaagagcggtgtgggtgtggcttcaatgggtgtgatgaggcctgagttggtgatgaaatccattgttccagttgttatggctggtgttttgggtatttatgggttgattattgctgttattattagtactggcatcaatccaaaggccaaatcgtattatctttttgatggttatgcccatctttcctctggtcttgcttgtggacttgctgggctttcagctggaatggcaatcggaa

SEQ ID NO: 2009 - DNA, 447 bp, Gossypium hirsutum
  unsure (1)..(447): unsure at all n locations; Clone ID: LIB3493-030-P1-M1-A11
gtgtagctgtgatgacggtgatgttttcagggctggtttcagtggctgaatctgcagtaggggtgaactgggggacaatttcattccacaagctgaagccatccacggtggtggatctgttgaaggacaacaagattcaaaaagtgaagctttttgaagctgacccattggtgctaagagctttgatggggagtgggattcaggtcatggttgggatacccaatgagatgttggctgctctcagctcttcccccgccgctgctgatttgtgggttcgccaaaatgtatctgcttatgttggcaaaggtggtgctgatatcaggtttattgctgtcggaaatgaacctttccttacaagttacaacggtcaatttcagtcctatgtaatccctgctatggcgaatntgcagcagtctctggtcagagcaaatcttgctggatacataa

SEQ ID NO: 2010 - DNA, 307 bp, Gossypium hirsutum
  Clone ID: LIB3493-030-P1-M1-A12
cggacgcgtgggcgctacttccgtcctaatggtcaggaaaaaatcgccgccgtgattcaaaactcagcccactgtctccgatcgtgtcaactcgtaacccaatctctcaaatatggatcgacccagattcgtaatcgacgccgtcgaagccgagcaaatggccaaacaatcaggcaagacggtgctccaactccttccttctttggtcaaatcagcccagtccgttgcccgcccgccgatctcgaagtaccaagttggggcagtcgggatcgggtcatccggtcggatctttttcggagccaattta

SEQ ID NO: 2011 - DNA, 310 bp, Gossypium hirsutum
  unsure (1)..(310): unsure at all n locations; Clone ID: LIB3493-030-P1-M1-A2
aaattcttaagcccaaactcaatgaaaatgggatgtttgtcactcaggctggcgccagctggaatattcactcacaaggaggtcttttcctctatataccacacaatcaggcaggttttcaagtatgtgttggcatacacagctcatgtgccatcctttgctgatacatggggatgggttatggcctcggatcaaccattctccattggtgcagaagaaatngacaagaggatngctgaaagagtagatggtgaattactctacttgaatggctcttcattcctttcctctgcaaccatgaacaagactg

SEQ ID NO: 2012 - DNA, 475 bp, Gossypium hirsutum
  unsure (1)..(475): unsure at all n locations; Clone ID: LIB3493-030-P1-M1-A3
gcaattttgagactcttccatttagcaatgnctgcttctctagctcttaagaggctcgtctcatccaacatcctccctaactccttacgcgtcgccatcgctccatccacctccagactctttaataccaacgccgccacgcctgatgaccacgatgatcgccgtcgtgctgacggtttcttctcagatctgcaggggcggcgccagggggccaaaaaagatgtgtttgatcctttgtctccaacaaggagcctgaacatgatggatcaagtcaaggggaatcgatttctctccacatcccgtgacattccagggcttgggagcgaggccaaagaatcaaaccttcgcccgttatctcctcatcttcctatttataagccacaactttctgcgactctntcaattaccaacaggatctccggggttttcctaactactgcacttttgttctcttatcttctttctctgaaaatgg

SEQ ID NO: 2013 - DNA, 435 bp, Gossypium hirsutum
  Clone ID: LIB3493-030-P1-M1-A4
aaacattgctgtgaagaaaacaatatagcattgggtttcgtggaaactcaattagggaaagggaaattaacagctcccgggctataaaccctaaaagctcttcccaaatttggttgagaagaaatggagaattcaactcaagaatcccacctgagatccgataattcggtaacctacgaatcagcttacacagtttatgccatggccttatcttccacgccttcctccaccaatatcaaccatcaacgcatcgctctcggcagcttcctcgaagattacactaacagagtcgacataatctcatttgatccagaaaccctctccttcaagacccacccaaagcttgccttcgaccacccttatccacccaccaagctcatgttccaacccaatcgaaaatccgcttcatcctcttcttcttggtccgatcttctc

SEQ ID NO: 2014 - DNA, 454 bp, Gossypium hirsutum
  Clone ID: LIB3493-030-P1-M1-A5
attttattgtcacatctgaccaagagcaggtggagggcctatcaaaatcattggactttataatcgacactgcatctggtgatcatccatttgatccctacttgtctctcctcaagtctgctggtgtttatgccctcgttgggttcccgagtgaaatcaaatttagccctgcaagccttaatatgggtatgaaaacattcgcaggaagtgtaacagggggaactaaaatgattcaagaaatgataagtttttgtgctgctcgtaaaatatacccacagattgaggtaatccctatccaatacgccaatgaagctcttgaaaggctggtcaagaaagatgttaagtaccgatttgtgatcgacatcgagaacaccctgaaatgagatcatgccaagagaaaatgaatttgttttctacaataaatagcttttagttccggctattgaagaacata

SEQ ID NO: 2015 - DNA, 460 bp, Gossypium hirsutum
  Clone ID: LIB3493-030-P1-M1-A6
ctttacttccgttcttttgccgtcgtatttttgggagagatttgttttttttcgcttctttcgatatggggaagatcaagatcggaatcaacggatttggaaggatcgggcgtttggttgccagagttgctctccaaagtgaagatgttgagctcgttgctgttaacgatcctttcatcaccaccgattacatgacctacatgtttaagtatgacagtgttcacggtcaatggaagcaccatgagcttaaggtgaaggactcaaaaacccttctctttggtgaaaagcctgtcactgttttcggcatcagaaaccctgaagaaatcccttggggtgagactggagctgattatgtcgttgagtctactggtgttttcactgacaaggacaaagctgctgcccatttgaagggtggtgcaaagaaggtaatcatctctgctcccagtaaggatgctcccat

SEQ ID NO: 2016 - DNA, 445 bp, Gossypium hirsutum
  unsure (1)..(445): unsure at all n locations; Clone ID: LIB3493-030-P1-M1-A7
cggacgcgtgggcggacacttggactgttgctgcacccttactggggtgctcttcaccttctctcacgcccgcttcatcacatctgaatcccaacatgatgtcacccccgaaaaatccgaatccgaatccgaccccgaatccgccatccttctccccagcgagaaaccccactttgaaccccccaaatttctcgacttcaagcacgatgatgatgcctccggcgtcgcctccggcgtcgcctccggcgtcgcctccgttcctttgaccaggatccgttttaaccctgtcaaccgccacttcccaaggcgtcccttgaatccgttccgtcacaagcacaactgccgtttccataaacgcttcaggcttttgaatccacgcttccatcanaagcgcttcatttcttacggcaacgatatgatactgtccaacgagagaagttttgac

SEQ ID NO: 2017 - DNA, 401 bp, Gossypium hirsutum
  Clone ID: LIB3493-030-P1-M1-A8
gtgaggaaaaagaagcttcggtgttgggttgttaagtgggtgaaacaaaaaaaaaaaatggagggcaaagaggaggatgttaagctaggagccaacaagttctctgagagacaacctattgggacatcagctcaaacagacaaggactacaaggagccaccaccggcaccattgtttgagcctggtgagctcaagtcatggtctttctacagagccggaatcgctgagtttgttgctaccttcttgttcctttacatcactgtcttgactgtcatgggtgtctctcaatctaagaccaaatgtactactgttggtattcaaggcattgcttgggcctttggtggcatgatctttgctcttgtttattgtaccgctggcatttcaagtggccatattaaccc

SEQ ID NO: 2018 - DNA, 500 bp, Gossypium hirsutum
  unsure (1)..(500): unsure at all n locations; Clone ID: LIB3493-030-P1-M1-A9
tctgcttgcaatatcttcattctcaagnggaatgttatctcaactgcgacaactcatgggacaattctcccaggaatcacaagaaaaagcatcatggaaattgcatctgattttggataccaggttgaggaacgagctattcagatcaaggaggtgtttgatgctgaagaagtcttttgcacaggaacagctatggttgtgaagtctgttgcaagtataacctaccagggcaaaaggatcggatacaaactgggagcagaaacactggctcagaaattgcatgcaacactaacagggattcaaactggtctgatcgaggacaagctgggatggaccacgctcatcgattgacctcctcttttatgatgcaatatctacatttcgcgttggaatttgccattttcgtttcggttttctttagtttcaatcaaaggaaatgtttactttcaggcgctctgtgaaagctaaagaataataatagcttaaatatttccattggt

SEQ ID NO: 2019 - DNA, 410 bp, Gossypium hirsutum
  unsure (1)..(410): unsure at all n locations; Clone ID: LIB3493-030-P1-M1-B1
tggatatgaacctccccttaagcccaagcataagagaacagggatactatcgtcattgtgcggaagttctcgtaagaagaggtcaaaatcaagtaaaaagggatcagacaagaagaaatctggcaagcatattgattctactgtaccaatattcaatctaaaagatataaaaaagggtgttgaaagggctgggtttgatgatgaaaagtcattactgatgtcacaaatgagcctggagaaacgatttggtcaagctgctgtttttgttgcctctacacttatggaaaatggtggtgtncctcagtctgctacccccgaaacacttcttaaggaagcaattcatgttatcagctgtggatacgaggacaaaacagactggggaagtgagattgggtggatctatggttctg

SEQ ID NO: 2020 - DNA, 460 bp, Gossypium hirsutum
  Clone ID: LIB3493-030-P1-M1-B10
aaaatctgatggtattgccgggctttatggtggtttcaacatttcatgtgttggaatcattgtttaccgtggtctatattttggaatgtacgactctctgaagccagtgcttttgactggaagcatgcaggatagtttcttcgctagctttgctcttggttggctcatcacaaatggtgctggccttgcatcttacccaattgacactgttcgtagaagaatgatgatgacttctggtgaagctgtcaaatacaagagctcgctcgatgccttctctcagatcttgaaaaacgaaggtgccaagtctctattcaagggtgctggagctaacatccttcgtgccattgccggtgctggtgtgctcgctggatacgacaagttgcagctcattgttttcggaaagaagtacggatctggtggtgcttaaatttagggtgggactatctcccttcttttggta

SEQ ID NO: 2021 - DNA, 416 bp, Gossypium hirsutum
  Clone ID: LIB3493-030-P1-M1-B11
gggagcagcagctaacaagcatttttcagagggcatgactgatctcaaatctgaaaaagctcaatatgtggagctgcatgcgctaccttcctgcaaaatttggttcatttgtgggggacaactcgtccatcgaaagtgtgctagctaacagtcttattaatctgttctgaagtttcagcatacttgtttaaccgatgatttactgtaggtcacttgttgaaaatggacaatcaaacctgagcagctctgcttcaagttctagttattggacagtctctaacaaagtggctagcagttctgactcatctgtgtctgagacactaggggagagtccagactggcttgagttcaatgtactattcgacttccgcgaggatctttattatttatcaatgcctgaaatttaaaagcttaca

SEQ ID NO: 2022 - DNA, 403 bp, Gossypium hirsutum
  Clone ID: LIB3493-030-P1-M1-B12
ggtaattagaggaataagaactagaaaagttgttgcgattgcgatctcgggttatcttctccaataaattagaggttgcatttttctttttcttgcaagagcttttatattgaactgctggaatggctgaggagggtcataaggtcaccttgaatgtgtatgacttgagtcagggaatggctcggcagctttcgatgaccttattaaggaaggttattgagggaatatggcacactggtatggtagtttatggtaatgaatactatttcggtggaggaatccaacacattcctgctgggacggcaccatacgggagaccaattaaagtgatcgatctaggtgtcactcatgtgcctaaagatttgtttgagatgtatttacaggagattagtcctcgttacac

SEQ ID NO: 2023 - DNA, 440 bp, Gossypium hirsutum
  Clone ID: LIB3493-030-P1-M1-B2
gtttaatttcctcatctccgagctaccgctgccggtgaaagccgcactattcagtcttcggtcgccgctccctctttctatctattcaatctgaggtatggcaatggccgtggcagccaccgagaccagcaaagacccgacccaacctaactacgaagtcaagcttttcaatcgctggtcttttgaggatgtccaggttactgatatctctttgagtgactacattggtgcccaagcttcgaagcacgcaacctatgtgccgcacactgctggaaggtactcagtgaagcgtttccggaaagctcaatgcccaattgttgagaggcttacgaactcactgatgatgcatggccgaaacaatgggaagaaacttatggcagttaggattgtgaagcatgccatggaaaatatttatctcctgactgatcagaacccaattc

SEQ ID NO: 2024 - DNA, 428 bp, Gossypium hirsutum
  Clone ID: LIB3493-030-P1-M1-B3
aatacattgagtctgtacatagactataagcgtgggagatatacaaacggggacctcggtgctacctaaagtgtactgctattcaagcattgggattcaatgaatatcgacagcatatatcaggcgctactaagagctcacttgcgtcagcaacgagtatggagtacagaaagcagagcataggcctaatggtcgcaccatcaatgtggcagagatcgagccacatgacatagacggcccgttgagaagtcagcatgagctcattaaggctgccatggaatgtgtcgtgaagcaccacgctaaccatcgtatttcctacgggctaatccatcgagacactctagtttgactctcaacatgaggccttgatctctaagagaatgctaaagttagcacctgcacatcctgattgaagggtcagggagaat

SEQ ID NO: 2025 - DNA, 449 bp, Gossypium hirsutum
  Clone ID: LIB3493-030-P1-M1-B4
cggacgcgtggggataaaccgggcgactgctggcggatattggaaggcaaccgggtcagataagcaaatcatatcaaggagaaatcaagtagcagggatgaggaaaaccctagtttttcacatggggaagcctccacatggattaagaactgattggatcatgcatgaatatcgtttagtcaatataccaaacaatgatttcaacttggcaaacaacccaatgatgcagaattatttgaatcatgagatgaaaaatgggtactatgtcatgtatttttgaagaaaaccagtaagaaaagtagtgaggaggagattatgcagagtttttgtaataaaaatagaaatgaagcattgggtcataggatggaacccaaagtgtataattttatgagagaaaaagatgctgagtcatcatcttcatcatcagcaagttcgaggagtgatatcac

SEQ ID NO: 2026 - DNA, 436 bp, Gossypium hirsutum
  Clone ID: LIB3493-030-P1-M1-B6
caaaaggccaacacacacaaaaatcagttgatggttgataatttgaaactgagacgaagacttcaatggcgtttccagtagtcgataccgagtatctcaaggagatcgataaagctcgtcgagaccttcgcgctctcatcgccttgaagaattgcgctcctatcatgcttcgcttagcgtggcacgatgctgggacgtatgatgtgagcactaaaaccggaggtccaaatggctctataaggaatgaagaagagttcactcatggcgccaatagcggcttgaaaatcgctattgatttttgtgaggaagtgaaggctaaacatcctaaaattacgtatgcagacctataccagcttgctggtgttgttgctgttgaagtcactggaggtcctaccattgactttgtacctggaagaaaggattcaaacatttgccc

SEQ ID NO: 2027 - DNA, 521 bp, Gossypium hirsutum
  Clone ID: LIB3493-030-P1-M1-B7
gaaaccgggaaacaaaggactcttgttgggggaggactatgatgaagaatccattcagggaaattccttcctaaccaaaactgatatggaattcagttctacaaatgactttgatcgactaatgttaatccctgacgagtccttcgatttcatcttcactgaaaacattcaatccgccctcgaattcatcgaccggagtctcaaagttggcggtactgttgctgttcagcagctggactcatcgctttcattcaacaagccgtctaattacaagattgtttacttcaggaaattcaattccaacctttttgtgatgaaaaaggttgagaatgctcaaccgatcccaagctcgcaaaggcggcttttggggtataatacatcagaagcgaaacgggcagcattgaagaaattggaagacgttcttcttgaaccaccaagagcatcctcagggacgtccagaacttaccttaaacgaacgaaatatttgcccgatctattgggggactcactcgaaagctaca

SEQ ID NO: 2028 - DNA, 482 bp, Gossypium hirsutum
  Clone ID: LIB3493-030-P1-M1-B8
gtgatatccttctgcagaatgccccgcgggggtactggttggctgtggtttttctggcatttgatgtgttctttgcaatcttttgtgttgttttggcgtgtttgattgggattgctctcttctgctgcttgccgtgcatcattgcaattctttatgctattacggagcaggaaggtgcatcggaagcagatcttagtatccttccaaaatatagatttcagattataaacaaccgtgagaagcctagtttgggagctggaaaaatgatccccatagaaacaagcagtggatacttggcaaatgagcgcatactcttagctgacgatgcagaatgttgtatatgtctaagctcatacgaagatggcgtggatcttcatgctctcccttgcaaccatcattttcattcaacgtgtattgtgaaatggcttaagatgaatgcaacttgtcctctctgtaagtacaatattttgaagggaaatgag

SEQ ID NO: 2029 - DNA, 498 bp, Gossypium hirsutum
  Clone ID: LIB3493-030-P1-M1-B9
tttaaaatcaaatttattccattattagtgaggcgtttcattcttgtgaatcttttgtagcagttctcagtgttatcctatacaaatcagtggttggccattggagttaatggcatatgcttacctaacagtcagccctccaagcatgagcaagcagtttgaggaggtttgtaaactctctaccttctaaatcccaggctcaaagtttaagcattgaattcttaaagattacttcttcagatggctgctatggcatccaatgaatctattatcaggaaggatttaagataccctgaaattgaagaaaaagcactgcaatttattcttgacaattgtgaatcaagcatatcaaagtattctaaattcttgaaggaaagtggctccatggatttggatataacatctcaagaactacagaatcgaggagtgtttctgaaacagctagcagtagatttatgcataaatgagcagaaaatactacatcgggctcaatatata

SEQ ID NO: 2030 - DNA, 442 bp, Gossypium hirsutum
  unsure (1)..(442): unsure at all n locations; Clone ID: LIB3493-030-P1-M1-C1
gttttccgatcggtcttcttccggcctcggtagcnnagagtacactcttaaccaaacatccggtaacttcgccattgatctcggtggcacgtgcaagatcacgctcccgcctgacaactacctggctacttactcgaagcggataacggngaagattgaaaacggaaagatagcggaactcgatgggatcagggtccgggctntgttcanatggtggtccataaccgggattcgatccagcggngataatttggtctttgaagttgggatggttacggctaaatattctgctaagaactntgatgaaagccctctctgtgaaggccgtcattcgtcttcttaaaaagctaaaaccaaagtgaaaaataaagggcttctcagtttgctgcaaggattaagttattacgtacgtgttctgtaatcgtaagtatgtttgtctcgt

SEQ ID NO: 2031 - DNA, 459 bp, Gossypium hirsutum
  Clone ID: LIB3493-030-P1-M1-C10
cgtgaaaccaattttttatttgtgggaaagcgttgggtaaccaattaagcagatggatagtagttgtgtggcaacaagttttaggattccggagcaggttttgacgtcaagtgggcagcggatgcagctcttgggtttcggcaccgcagcctacccgctggtaacaccgcaagttgcaaagcaggcgattctccaagcaatcaagcttggtcatcggcatttcgatacagcttatatttacggaacggaacagccgcttggtgaagcaatcgtagaagcaatctcgcttggcttaattatatctcgagacgagttgttcatcactaccaagctctggtgcagcaatgcttatggagaacttgttcttcctcagcttcgcaggagcttgcaaaatctcaagatggaatacgtggatctctttcttattcactggcctttaagcttaaaaccagggagata

SEQ ID NO: 2032 - DNA, 484 bp, Gossypium hirsutum
  Clone ID: LIB3493-030-P1-M1-C11
ctgccctcttattctaaacctctccttgtgtcttccattagacccaaaatgccgcttcactcggcggtagcattgttttatgccgcagcttctcttttcgccattgctggcgccgaagatccctacaggttctacagctggaatgttacgtacggtgacatttaccctcttggcgttcgtcaaacgggtcttctcataaatgggcaattcccaggccctgatattcactctgttaccaacgataacctcatcatcaacgtctataacaacttaaacgaatcttttctcctctcctggaatggagtccaacaaaggaggaactcgtatgaagacggcgtgtttggcacaacctgccctattccaccaggaaagaacttcacatacatgcttcaggtgaaggatcaaatagggactttctattactacccatcacttggattccacaaggcagctggtggttttggagggatcaggatccttagtc

SEQ ID NO: 2033 - DNA, 391 bp, Gossypium hirsutum
  Clone ID: LIB3493-030-P1-M1-C12
cccacgcgtccgaggtgatgctgtgggaagtgtaaaacgtgtggagaaggcgaaggtggctgtgtttgcaactggtgttgattcatctgctactgaaacaaagggaactgttttgattcactctgctgagcagctagagaattatgcaaaaactgaagaagctaaggttgaggagctcattaaagcagttgctgattctggtgccaaagttatcgttagtggtggagctgtcggggaaatggcattgcatttctgtgaccgttacaagttaatggtcttgaaaattagctcaaagtttgaactacgacgcttctgccgcacaacaagcacttctgctcttctgaaactcagccaaccaaagccagatgatttgggatttgttgattcaatt

SEQ ID NO: 2034 - DNA, 81 bp, Gossypium hirsutum
  Clone ID: LIB3493-030-P1-M1-C2
ctatctaatcttactcattataatccccaaatctctatcactccttgagcctcagcctgctccttcctctgtctgggatat

SEQ ID NO: 2035 - DNA, 448 bp, Gossypium hirsutum
  unsure (1)..(448): unsure at all n locations; Clone ID: LIB3493-030-P1-M1-C3
cgccatggcaccaacaccggactgcatgacggggttgtttaacttgtcggattgtttggggtacgtgacggctggaagcaacctaacgaagccggacaaaccttgttgcccggagttggccgggctcgtggaaagcagccctcagtgtttatgtttattgttggataaaaacgcgacctcgagttatggggtcgacattgacatcgatagagctcttaagctacctaatgtttgccatgttaaaacccctcccgttagtctctgctctactatcaatggtggcgctccaattggggttccaacttcaggcactgaagtatctntatcaccaggattagctccaggcccttcaaaaggaagcaacactggtgcttcaaacatggaaatatttggtctggcttccttcattgccttaccaattgcctttcttcccatgctttttgggatt

SEQ ID NO: 2036 - DNA, 412 bp, Gossypium hirsutum
  unsure (1)..(412): unsure at all n locations; Clone ID: LIB3493-030-P1-M1-C4
attttcccctcatttggccgattctcatcccggagacaacaagctacacgttcaagcctggggaatgacttttcagccttgaaatctcctcttggcttcgattttaacaaagtaaaaaggaaatctatggcgtatttgccaggtaagaacctctttcctttctttntatttgctttcaaatataaaaatgataaacccaaaagaacgaaaaccaggaaaaaaaatagagtatccagatatttaaatcgaaaatcacctttgaattttggtggccttttggtgtatntcagtatgcgtaaatatttgcaggtacactcggtggcttttatagccggaaaaataaaaatttaaaaatctattttttctttttgctatttttccattatattttgctgcttctcgtgtattcctt

SEQ ID NO: 2037 - DNA, 262 bp, Gossypium hirsutum
  unsure (1)..(262): unsure at all n locations; Clone ID: LIB3493-030-P1-M1-C5
cctggctgcgaacttgtacgcaaagagcatggttggggaggatgcgttggtaaacgtgagcattgagaagcaagctgatgggaaactgagtgggtacatccggataaggagcaagacccaggggattgctttgagtctcggngacaagatcactcttaagcaaaagggaggcagttgatgcaataatatttcgagataaattgtttcatcgataccggtagtcattgttagttaaatctcctattgaatttgaaatgcatag

SEQ ID NO: 2038 - DNA, 385 bp, Gossypium hirsutum
  unsure (1)..(385): unsure at all n locations; Clone ID: LIB3493-030-P1-M1-C6
ctcacctcgtcgttgaagcgaaagcttatctcgttgcgtctctgaatctgatcaatcaacacctgaaaaggaaaacttacaaacaacaactactactagtctactacccagcactagaagcagctcgtagccagccatggatgaagagtacgatgtcatagttctaggaactggtctcaaggaatgcatcctcagcggtcttctntctgttgacggactcaaggttctgcatatggataggaatgattactatggaggagagtctacatcactcaacctcattcagctctggaagaaagttanaggaaatgataagcctcctgctcatttgggctctagcagaaattataatgtggacatggtccctaagtttatgatgggcaat

SEQ ID NO: 2039 - DNA, 496 bp, Gossypium hirsutum
  Clone ID: LIB3493-030-P1-M1-C7
aagatcttttgtttttagacattgcccttgactctactgttaggacagctattgaaagaggttatgaggagctgaataatgctagaccagagaaaatcatgcatttcatcactcttgttctagaaaaccttgtgctttcttcagatgacaatgaggatctggtctattgtttgaagggatggcaccattccataagcatgtgcaagagtaaaagtgctcactgggcattgtatgcaaaatcagtactagacagaactcgccttgcactggctagcaaagctgagacgtaccagcgtatcttgcaaccatcagcagaatatcttggctcattgcttggagtagaccagtgggctatcaacatattcacagaagaaattatccgtgctggatcagctgcaactctatcctctctaattaacagacttgatcctgttcttcgagagactgctcatcttggcagttggcaggttatcagtccagttgaggttgttggata

SEQ ID NO: 2040 - DNA, 224 bp, Gossypium hirsutum
  unsure (1)..(224): unsure at all n locations; Clone ID: LIB3493-030-P1-M1-C8
ctccttctaaacccaaatcagacaccttcagatttcaatctgccatgggggcttacaagtacgtgtcagagctatggaggaagaagcaatccgatgtgatgaggttcttgcagagggtgaggtgctgggagtaccgttagcacccttncatcgtgcgagttaaccacccaactcgccccgacaaggctcgtcgattggggttcaaagccaagccaggttatgtc

SEQ ID NO: 2041 - DNA, 397 bp, Gossypium hirsutum
  Clone ID: LIB3493-030-P1-M1-C9
ggggaatactgctgctttcttggcatcacgattggcttcggctatcacaggtgccgtcatatatgtcgataacggtttgaatgcaatgggtatcggagttgacagtcccatatttaaagacctcaacattccgagcgacaagcactagaatccggtatgccaaggtcgagacccgaaattcgatgccaaatgtttagtatcgatgtttaatctccattgcccggcctttttaaacttttctgtttttggtagattgagttttgtcacaataggtttcagcaaaattgtggatgaacaatttaaattaatggatggatttggtggggtcttaagagttaaacagccctttcattgtttcatttattacttttttgtattttatttaatattctttttt

SEQ ID NO: 2042 - DNA, 404 bp, Gossypium hirsutum
  Clone ID: LIB3493-030-P1-M1-D1
tattttgtgggacaccacaaaaatactcatcacacactacaaaacaaacagtaccaaaagaaaaaaggagtaaccacactgatggcgactaataagttagcctcatatcaggcatcacttacagcaagaaaaacactaacaagaagctcaatccaacaacagcaagcctttcagccccaaaacacatagcagcattatcatcatcagctacctgatcagctgggtcatcatctggtgactcagctggtgagtctgaatccggtgttggtgctgccttagacttagtcttagacttggacttggttttggatttagatccctttggtgcatctgctgcctcctctggggcaggggctggggctggactaagagctggcttgaacaattctttaggcataaacact

SEQ ID NO: 2043 - DNA, 458 bp, Gossypium hirsutum
  Clone ID: LIB3493-030-P1-M1-D10
atcctcctcaaggatatcccccacaaggagagccaccggctggatatcctgcaccagcgggatatcctccacatggcggatacccacctgcagggtatcctcctcatggaggataccctcatccacctcatggtggatatccaccagctggttatcctggacacggttcgcatggacctgggatgggaggattattagccggtgctggggctgcggctgctgctctttacggggctcaccatttgtcacatggagctcatcatcttgcacatgggggatactatggccatggtcacggaaaatttaaacatgggaaatttaagcacgggaaatttgggaagcggtggaagcatggcatgtttggtaaacataaagccaagttctttggcaggaagtggaagtaaatagtcccgtcttccatgtcccatacgaatcttatcatactagtatgctctttt

SEQ ID NO: 2044 - DNA, 434 bp, Gossypium hirsutum
  Clone ID: LIB3493-030-P1-M1-D11
caattacaaatgctatcgagatatatgacaggttgagtggtggtattaattttatggcctccaataacgactgtggcatgagagaatacgataccgagagatttcaacttttgaatcatttccaattcccttggcctgtaaaccatacatcaatcagcccggatcggagacttattactgtagttggagatcacttggatgcgttgcttgtggattcacagaacggaaaggccgtagccacagcagtaggtcatcgagattactcctttgcatcagcatggcacccagacggacgggtatttgccacaggaaatcaagacaagacctgccgtgtatgggacataagaaagctggcaacgccggttgcgactctaaaaggaaacttgggtgctgtaagatcgatccgtttttcatccgacggccagttcatgata

SEQ ID NO: 2045 - DNA, 90 bp, Gossypium hirsutum
  Clone ID: LIB3493-030-P1-M1-D12
ctgagaaggaaatttcaaccatcactccgttggtctttaaaagtaattttatagaagtatggatggtgctggacagctagaaaatgggag

SEQ ID NO: 2046 - DNA, 478 bp, Gossypium hirsutum
  unsure (1)..(478): unsure at all n locations; Clone ID: LIB3493-030-P1-M1-D2
gttttcaattaggtggtctcaaattgctgggggttaccaggaagaaccgacaatgaaatcaagaacctatggaactcctgtttgaaaaagaagcttaaacagaaaggcatcgaccctgtcactcacaagccactctccgaggtcgaaaatggcgaaggaagtggaagcaacaagccatctttggtgggtcatcatccaattcatcaatatacatngnncgccccaccaccaccacagcttttctctaactggttcaaccctgaaatttccaccgccatgaccgcctcttatggacccctatactatggaacccacacggtggctcagccaataactcaactgggggatgttcaaacacaactgagaagagaggaagagaagagaagaaccaatgactgagttctaataacctttatatgcggctgttacaaatcaaccacatctatacattcagacaataagctgtctacgatgtata

SEQ ID NO: 2047 - DNA, 482 bp, Gossypium hirsutum
  Clone ID: LIB3493-030-P1-M1-D3
ctcgttttcatggcggttgttgtggcgtttgcgggggattcagcgccgtcgccgtcccctaaaagttcatcgccatctaaagggggggcgtctccgccttccaagtcaccttctccctctcctccttcctccaagaactcctctgcatcctccccatctccctcctccggcggcggctccagcaaaaacaacagctctagtagcagcagcagctcccctccttcgccaccatcaccaacgaaatcctccgacgcacccaagtcatcctccggtggatcctcaagcagctccaaatctcctcccgctcctgccccatccagctccagcaaaagccacggaagctccgccccaaccagcagcgacgaagaggagtccccttctgaatcccccaatgcctccaaatcccctcccataccagaagctgaggtccctaataaagatagctctctatccgacgctccagccagcgatttcgcgccaga

SEQ ID NO: 2048 - DNA, 453 bp, Gossypium hirsutum
  Clone ID: LIB3493-030-P1-M1-D4
acttggtggcgatgtataagaagatttacagaggagatttcaagtgtgcgcgcatggttctcacctgaagctcggaggctaatatccaagcttttagacccgaacccgaaaacccgaatcgccatctccaagatcacggaatcatcttggttcaaaaaatcaatccccaagactaaaacaactaaggaagaaatagaattcgaagcattcaatggagagaaatcttctaaacccgagaccttaaacgcattccacataatttcattgtcggaaggcttcgatttatctccgttgttcgaagagaaaaagagggaagagaaagaggagttgaggttcgccacgacgaggccggcaagcagcgtgatatcgaggctcgaagaggtggccaaatcggggaagttcagcgtcaaaaagagcgagtgtaaagtgaggttgcagggtcaagaatgtggg

SEQ ID NO: 2049 - DNA, 443 bp, Gossypium hirsutum
  Clone ID: LIB3493-030-P1-M1-D5
ggttcatcttcagccgatgagccctacttcggtcgggcaagttaatgttgtctgggatgcctatgcagcaacgaaggatgctcatggggtttgcattctgacagagtgggatgagttcaaaaccctcgattaccagaggatttacgataatatgcggaagcctgcgttcatcttcgatggccgtaacgttgtagatgaagccaagctgagggcaatcgggtttattgtctactccattggcaagccattggatcaatggctcaaggacatgccagctgtggcataagagcatcattttgagagaagtataatccgattacacagttttcattgcattacattttatttcttctagttttaagatcctgcttcgacttgtatcgagttattacatgacacagtagtgtctgaatctgtctttaacgggtaggatatattggatt

SEQ ID NO: 2050 - DNA, 489 bp, Gossypium hirsutum
  Clone ID: LIB3493-030-P1-M1-D6
gttttccaatagttcgtaacaatggcggtctgacggcaagctccagctaccctgatgcaaccaatcaaggttgctgcaccatcaaggaccaatgtgccgctcaggtcctcccagagcgtttctaaggccttcgtttggagcctgttggtgctaggcttacctgctctttgcaaactgacctcaaggacttggctctgaagtgtgttgatgctaccaagctcgctggtttcgctcttgctacatctgctcttgttgtctcgggagcaagcgctgaaggagttccaaagcggctaacctacgctgaaatccaaagcaagacatacatggaagtcaaaggaacaggaactgctaaccagtgcccaaccatcgatggtggtgtcgactcttttgccttcaagcctggcaaatactacgccaagaagttctgcttggagcccacttccttcactgtcaaggctgagggggttaacaagaatgcccctcctgagt

SEQ ID NO: 2051 - DNA, 453 bp, Gossypium hirsutum
  unsure (1)..(453): unsure at all n locations; Clone ID: LIB3493-030-P1-M1-D7
ttgagagggactttttccagttgaagcccgatatacagatgctggtagccgtcttccaccatcccagcaagagtacctgattctaggtcttaatctcttgagacttcttgtccagaacagaattgctgagttccatactgaactggaactgctttcggccactgccctggagaatccttgcatcaagcatgccgtggagctggagcaatccttcatggaaggggcgtacaatcgtgtcttgagtgctagacaaaatgctcctcatgaaacttatgtttatttcatggatctcttggcaaaaacagtgagagatgaaatagctggatgcagtgagaaggcatatgattatctttcaattaacgatgcccgacagatgttgcttttctcatctgatcaagaacttttggaatacatcaaagaggagcatnctgattgggaggtgaagaatggatc

SEQ ID NO: 2052 - DNA, 363 bp, Gossypium hirsutum
  unsure (1)..(363): unsure at all n locations; Clone ID: LIB3493-030-P1-M1-D8
gaaagatgacagtcgagtaaaagcagtagaggtaaataaggaggaggatgacaagatgaggaccactgctgcaaatgttgctgctcgtgctgctgttggaggggatgacatgctgtcaaaatggcagcttatggctgagcaagctcgccagaaacgtgagggaggaacggatgcggcatctggttcacaggcaagtaaagatgcaaaccgcaggcctttatctgcatctgggaaaagtacaaaggacaatcaagaatctgaaaagaggggccctctcaatcctcatggatctgggacaagcaagaaatttggccggaaccaaggtacgacactcacggnccatgctagagtggctcgtactat

SEQ ID NO: 2053 - DNA, 428 bp, Gossypium hirsutum
  Clone ID: LIB3493-030-P1-M1-D9
ctctccttctgtttctggtcaagccaatgtgggaagactccccttttagctcacagctcctctcttgagtactataatgggtaaggagaaggttcacatcaacattgtggtcattggccatgtcgactctgggaagtctacaaccactggtcatttgatctacaagcttggtggtattgacaagcgtgtgattgagaggtttgagaaggaggctgctgagatgaacaaaaggtcatttaagtatgcatgggtgcttgacaagcttaaggccgagcgtgaacgtggtattaccatcgatattgccctctggaagtttgagactaccaaatactactgtactgtcattgatgcccctggacatcgtgacttcatcaagaacatgattactggtacctcacaggctgactgcgctgttctcattatcgact

SEQ ID NO: 2054 - DNA, 131 bp, Gossypium hirsutum
  Clone ID: LIB3493-030-P1-M1-E1
gctgaaaacagtttcagctgaaatccgagcccgatttccccatctaaagatcaaggtcgtggcccaggatttctccggcaatatatcggctggtgccgggttgatagaagaggcggtgaagggggtggaag

SEQ ID NO: 2055 - DNA, 371 bp, Gossypium hirsutum
  unsure (1)..(371): unsure at all n locations; Clone ID: LIB3493-030-P1-M1-E10
gcaaaatggcatccccgatactaaatttaggtgcattattctgtgaggggctttatccttaggcttcagttcggctaataggttcctgttggatcaaaccaatcatgcccacaaaaacatggaccctgctgtccatgaaccaatgaaaaaccctagtgatgaaaaacttggtgtgggttatggcgttggaagtggctcangaaatggcatggtatatggccttggatatggcattgaagatgggaaccagttaggtacagccattggatatggcattggagaagggaaccgggtaggtacaggcattggaaatggcatgggaagtgggaaccagttaggaatgggcattgggtatggcattggaaatgggg

SEQ ID NO: 2056 - DNA, 232 bp, Gossypium hirsutum
  Clone ID: LIB3493-030-P1-M1-E11
cttccttttgctaaggattcgacctagcggtgcgccgcacctgtgggtcatcggtgccttacacctccaccttggccgacggttcatggagcgaagtcaggtacatgtgcgggcataccactaacgtggcatggtggagcggcgcacgacgcggggcgtgtgaaggttgttcggcagctgagggctacggcgcgaaggaactctaggattcctgaaagagttttgattttgg

SEQ ID NO: 2057 - DNA, 471 bp, Gossypium hirsutum
  Clone ID: LIB3493-030-P1-M1-E12
gaggagagcactcaaggggttgcgtgcgtggattactggtcaaaggaaagatcagtctccgggaactaggtcggaggttcctgttgttcaagtggatcctgttttcgaaggtttggatggtgggtatggtagcttgctgaagtggaacccggttgccaatgttgatggtaaagacatttggaatttcctccgggcgatgaatgtgcccgtcaattctttgcatgcccaaggatttgtgtccattggttgcgagccttgcacgagaccagtattaccaggacaacatgagagggaaggtaggtggtggtgggaggatgccaaggccaaggagtgtggtcttcataaagggaacctgaaagaagacggtgcagctcaagttaatggaaatggggctaccactgaaagtgacattttcaatagccagagcttggtcacactgagtaggactggaattggaaatttggcaaaatt

SEQ ID NO: 2058 - DNA, 408 bp, Gossypium hirsutum
  unsure (1)..(408): unsure at all n locations; Clone ID: LIB3493-030-P1-M1-E2
caaattctcaaccgacactgaagcagaaatnaaggctgttatgaatgcagcgtatggctgccggggcatttaatgctgtaatttgtactcaccatgctcatggtggtaaaggagcggtcgaccttggagttgcagttcaaagggcttgtgcgagtgggaatcagcaactcaaatacctgtatcctttggatattagcattaaagagaaaattgaggcaattgctaagtcatacggtgccagtggtgttgaatacaccgaacaggctgagaaacagatcgagatgtacaccaaacaagggttttcgggtctaccaatctgcatggcgaaaactcagtactcattntcgcacaatgctgctgagaagggagcaccaggtggatttatcttaccgataagggatgtgcgag

SEQ ID NO: 2059 - DNA, 440 bp, Gossypium hirsutum
  unsure (1)..(440): unsure at all n locations; Clone ID: LIB3493-030-P1-M1-E3
ggaacattgacgttgacttggattctgatggtgtngctctcccaagtagcggtgcagagccaatactactcggagagcttaccatatgatcccaggccggttaaggtcactaatctttacttgtttttgcatgaaactctccgcggtaagaacccaacagtagtcatggtagcccaagctaacaacacaagcaacgacaactactcatcagtgccatttggcaccctatatgccattgatgatcccctcaagataggtcctggggacaactcagaggtgattgggaatgctctgggacttgggatcttgtccggcaaaaattcaacgaccgtggtgatgtacttagattttggatttactgccggaaagtttaagggcagctctattagcatattttcaaggaattcgttaataaagatggaacgtgagcttttcgtggt

SEQ ID NO: 2060 - DNA, 317 bp, Gossypium hirsutum
  Clone ID: LIB3493-030-P1-M1-E4
cacaatttgaagtacatttttacctcgtctatgcttttgagcctcaagctactaaggcggatagaagtaaaagaatgcaatacaatggaacaagtgattagggaagacgaggaggaagcaacagcacatgagttaacatttcctgagctctactctgtagaaataaaggcgtgtttcaacttgacaaatttttttttgggaagtcgagctcttgaatttccaaagttaagtcatattgcgatagttgggtgtccaaaaaatgacggcattgtcttcttcaatttcaagagagagtgaaaaagtgattggcgagcaag

SEQ ID NO: 2061 - DNA, 205 bp, Gossypium hirsutum
  Clone ID: LIB3493-030-P1-M1-E5
ctttataaaaaaagaatctactgcttctccaagttcccttcaatcggggccgaccacaaaaccctaaccttggctctcaactccaccaggctggctcagtctcgagccttgcagaccttctcgctccccgatcttacttactactatcgcgcactcaagcccgacatcattgtagagatcatccagctccatcaccagaagcctc

SEQ ID NO: 2062 - DNA, 357 bp, Gossypium hirsutum
  Clone ID: LIB3493-030-P1-M1-E6
gggaatccgaaaatggagaaaactgatggaatggggaaagaaaatggaagcacagaagaaaagcaaagtttcaaagatggatcaatttgtgggtataattcgcttcaccacctcttgagtgcaaatcttaagcctcaaatctaccaggaagtcagccggttgcttctggggctgaattgcgggaaaacacttgaaactattgttctacctgaatcagctaaagccctctcttcaaaacatgattttgatcttcaggatttcaaattttctgctgaccaagaattggtaagagaaccccgggtagtaagggtcggtcttattcagaacttcattggttttccaaccactggttccttt

SEQ ID NO: 2063 - DNA, 392 bp, Gossypium hirsutum
  unsure (1)..(392): unsure at all n locations; Clone ID: LIB3493-030-P1-M1-E7
gttaaatctgcagaaacaatatatgagantgtccaagcaataattgcattggaggagatgattaaaaccgagtacttgaggaatgagtggtggtattggtcatcactatctgcagctgcggaaatttccactgtgtcttctcttgctctacgtgtatactcacttgatgctgctattgtttatgaaaagtcatgcgactttaattcaattgacaatttgaagcccagcagcatgccaggcccaaagctgccctccaacttggatctgccggagaagtgcaaggtgagtcggaagactatcaagaaaaggaaggaaccagaaggctgatctttgtgaaataggagtntcaaatcctagaggatcttattttaatcaaacttgatccctgtggc

SEQ ID NO: 2064 - DNA, 412 bp, Gossypium hirsutum
  unsure (1)..(412): unsure at all n locations; Clone ID: LIB3493-030-P1-M1-E8
gagacaatgagaggaacattgacgttgactgggattctgatggtctggctgtcccaagtagcggtgcaaagccaatactactcggagagcttaccatatgatcccaggccggttaaggtcactaatctttacttctttttgcatgaaactctccgcggtaagaacccaacagtagtcatggtagcccaagctaacaacacaagcaacgacaactactcatcagtgccatttggcaccctatatgccattgatgatcccctcaagataggtcctggggacaactcanaggtgattgggaatgctctgggacttgggatcttgtccggcaaaaattcaacgaccgtggtgatgtacttagattntggatttactggcggaaagttaaatggcagctttattagcatatttttaa

SEQ ID NO: 2065 - DNA, 256 bp, Gossypium hirsutum
  unsure (1)..(256): unsure at all n locations; Clone ID: LIB3493-030-P1-M1-E9
actctatcatgaagtgcgatgtggatatcgggaatgtatctatactgggcattgtnctcantgggggttcaaccatgttccctggtattgcggaccgcatgagcaaggagatcactgggggggctccaagcattatttttattaangtcgntgcgccaccagagagaaagtacagtgtctggattggaggatctatcttggcatcactcagcaccttccaacagatgtggaattccaagggtgagtatgatgaatc

SEQ ID NO: 2066 - DNA, 449 bp, Gossypium hirsutum
  unsure (1)..(449): unsure at all n locations; Clone ID: LIB3493-030-P1-M1-F1
tcaaggtgaggtgggattgccttgcgacagagatgttcctttgattggagtcattggtaggctanaagagcagaagggttcagatattttggcagaagctattccgaaattagctgctgaaaattgccagattgtagtccttggcacaagcaaaaaggccatggagaatcagattgagcagctggagatccaataccctgacaacgttagagcagtagccaaattcaatgtcccattggcccatatgattattgctggtgctgactacattttggtccctagtagattcgaaccgtgcggtctcattcagctgcatgctatgcgatatggaactgttccgatagttgcctctactggtggacttgttgacacggtcaaggaaggattcacagggttccaaatgggagctttcaatgttgaatgtgatgaaatggatccaagtgatgtga

SEQ ID NO: 2067 - DNA, 386 bp, Gossypium hirsutum
  unsure (1)..(386): unsure at all n locations; Clone ID: LIB3493-030-P1-M1-F10
atagaactgatgaacctgctgctattnagtctgacaacaccacttaccgatggtaccttaaaatatacttccgatataatggctgagactgtcaatcttccagaatctgctgctgtttcttcctcttgcattccagcacctgaagaaagcaatcttgaaattgactctcaaaatatatattcggaggagaaagctgatgacagcattgttaaacagaaccttgattctgagcatgctggatctgtcaaacactctgataatatcgaacatgctgacaatgaagtggcagttcctgtacaagcgtcaaaggatgctggtaaggatgttcttactaatggctntgatggtacagttcagatgtctgaggatgtaaatgacatcaagca

SEQ ID NO: 2068 - DNA, 387 bp, Gossypium hirsutum
  Clone ID: LIB3493-030-P1-M1-F11
aaaagatttccggttttattttgatttggagcatcttaaggaggtagcatctgctgtggaggagagtgagttcttgcgagtgaggaacaaatggaataagcgccttgaaagaaaagggccactcaagaccgacacctcctatgaagatacacctatgcaactcaccatggatcagagcacgatcagtacaacagcatgctgatgcaccatatccaggaaactgatcttacagggtatgtgaagagcaggcagctaattacattcataggccatggcatgctttatggaaatcaaagagattgatgaatatagtgactgagatcagtggacaaatggactgggattttgatgctgctcatgtggttcgaggggaaaaggcaccaaata

SEQ ID NO: 2069 - DNA, 427 bp, Gossypium hirsutum
  Clone ID: LIB3493-030-P1-M1-F12
gtgataatagcagtgatgatgaagagagtgaagatgatgaggaagatgaaaaatctgtagttttgaacaatgggaataattcagattctagtaagggaaccgaggggagttccggtttggtttctaggagaagacgtgatggggaattctcaggtggagtatcgagtgagagtggttccgaggaagagaaagacattgttccactgcaaagctcgaaatccggtggggaagatgtgctcaatgtagaaaatgataaggttgaagttgaagcaattcaacccgagatactggaaaataatggaactaaaaccgaagatcagaaggaaatagttagtcagggtgccgatgttccagttcaagaaaatgaaggagttgggaacaaactgatagatagagtcgatggttgttctgatgtgaaatcagaatt

SEQ ID NO: 2070 - DNA, 459 bp, Gossypium hirsutum
  unsure (1)..(459): unsure at all n locations; Clone ID: LIB3493-030-P1-M1-F2
gtctgtaataaaatctgcaatcttaattctntgggtgtttttatctgtgacgcttcagttcgggtgttaggttgctccaggaacagcccaatgatgaccccaaaaacatggacgctattcctcccattgatgcactcaaccctaccgagttgaatggacccggtgttggcattcacgaagatcatgttgtcccaaaaggtgctgaaattggtactcttggttttggttttgaaggtggtcctgataaatgttgttcttctggatgttccggtaattgtaatcctggtggtttcgttctaccatttcctcaaattccagaaatcccaagaattccagaaatcccacaaatcccacagatcccacaaatcccacaaattccactaatcccacagatcccacaagtcccacagatcccacaagtcccaaaaatcccactaatgccaggacagtcgggatgtg

SEQ ID NO: 2071 - DNA, 451 bp, Gossypium hirsutum
  Clone ID: LIB3493-030-P1-M1-F3
ctcttgatgcctctgaaatagtcataaccaggggtagacaggaaatagatgaacaatggcgtttatatgatggttttgatccagtcctggaacgtaaactgcgtgcaaggatcagacgtaatgtcagctgctatggaaagttcatgcctcgcatggttataattcctcctggaatggaattccatcatattgttccacaagatggtgatatggatggtgaggtagaaggaaatgaagaatatccatcttcccctgatccgcctatctggtccgagataatgcgcttcttcagcaatcctcggaagcctatgatacttgcccttgctagaccagatcccaaaaagaacatcactacgttggtcaaagctttcggtgaatgtcgtccactacgggagcttgcaaaccttactctaatcatgggaaaccgagaaggaattgatgaaatgtcaag

SEQ ID NO: 2072 - DNA, 499 bp, Gossypium hirsutum
  Clone ID: LIB3493-030-P1-M1-F4
gagaaaacaaaaggttaagtgaagatgggaggagagcaagcactgaagagaattccacgcattaagtttcctcaaagacacccaaaaccctcgccttcaggttcaatctctgaaatacaagcaacacgcaaagatggaggtgtcattggtaacttcattgcaaggtcaaggttgagctcagatgttcctgctccgcccagcaacactgctgtaggtggaaaagcatctcttttgccaaaacgtactcctgtctctgagagggaaatcgaggctattctgttaggcggctgcttctgaattttcagctgtcaaagctagctttcccgaagctcgaaataaaatttctgatctggtatatttctcccatcttagttctctgatatgtaaagaactgtttactgaagtttaaaaagcacaaaagaatcaaaattggtcttaaaaaaccattgtgggatgagacttcattctcagtgaaataatatgttgaaactctttttct

SEQ ID NO: 2073 - DNA, 444 bp, Gossypium hirsutum
  Clone ID: LIB3493-030-P1-M1-F5
gtaccttttgctgttgttggtgtttatcatggagatctagtcttcaaaatggccaaagcactacaacggtttggcatgaaaagagcattagttgtgcactcagagggtttagatgaaatgagtccccttgggccagggcgagtccttgatgtcactccagaaaaaattgagaagttctcatttgatccattggaatttggcattcctcgttgtactctagatgacctgcgaggtggtggcaagaactacaatgcggatgtgttgaagcgtattctttcgggggagagtgggcccattgcagaggcacttatccttaatgcagcagcagctctcctagtgagtggtcatgtgaaatcactttctgaaggggtagcattggctcgtgagacacaatcatcaggaaaagctctaaatacgcttaattcatggatagatatctccaat

SEQ ID NO: 2074 - DNA, 390 bp, Gossypium hirsutum
  Clone ID: LIB3493-030-P1-M1-F6
gtttgcattcaacaatggcagaagaagcaatgctaggttacctagcgacgtctgaagaaatcccagattcaggccaattcgcatcccaacatggtttccaacacaacgatgtcgtcaatgtcatcaagagcctccatggtttccgctacatcgatgctcaagacattaaaagggagagttgggtcctcactgatgaaggcaagaagtatgccgccgatggctcccctgaagttcaactcttcttagccgtccctcaagaaggttctatttctaaagacgaattacagaaaaagttagagccttcggttttcaaaattggttgctcacaagctgggaaaaacaaatgggtcgatatgggaaaacaagtttcgagaaaagttcaacatgtgg

SEQ ID NO: 2075 - DNA, 448 bp, Gossypium hirsutum
  unsure (1)..(448): unsure at all n locations; Clone ID: LIB3493-030-P1-M1-F7
gttaactctcattttaattatccattacagtccttatccaatgccgtggtcgtgacataacattctccctaacaaaggtatttaaatctgatcaaaatgaactcaaatcctatccaatagggtctcataaatgccatatctttactcctttggtccttatgaagatagcaggagagactactctgagacatcatcagcgtccacattggacaccctcgaattcacctcatgaatccttgataggagctctactgcctagaacatgaaatctatcctgatgtaacctttcactatgacacctgagatggtatatcacacgatgctatcaacactctcttctgctaagctggatcaagaaagcatgtaccgagagctgtctatcttgatctggaacccactgacatctatgaattgcggactggcccttatccncaacttttccaccctg

SEQ ID NO: 2076 - DNA, 475 bp, Gossypium hirsutum
  Clone ID: LIB3493-030-P1-M1-F8
gaagaagtatggtcaagatgcaaccaatgggggtgatgaaggtggctttgctcctaatatccaggagaacaaggaaggacttgaattgttgaatactgccattgctaaagctggttacactggcaaagttgttattggaatggatgttgctgcatctgaattttacggaacagataaaacttacgacctgaacttcaaagaagagaacaatgacggtaaacaaaagatctcaggagatgctttgaaagatttatacaagtcattcgtagccgagtatccgattgtgtcaattgaagatccatttgaccaagatgattgggagcactactccaaactaaccaatgaaatcggagaaaaagttcagattgtaggagatgatcttttggtcactaacccaaagagggttgcgaaggctattgctgaaaaaacttgcaatgcccttcttctcagggtcaatcaaatggatctgttactg

SEQ ID NO: 2077 - DNA, 441 bp, Gossypium hirsutum
  Clone ID: LIB3493-030-P1-M1-F9
ggatcagctgaccatctagcactcaatagtgagtcagaaactgatcgcgttgatcaacagtgaggaaactgatgaggacaaaggtcgaatgttcaaacctcttaatacaactggcctcatcccaaaacaaggaaagtctattgcagatcgtgttgatggaatatgggtatctggtggccgagttctaagcagccgtcccagagtaaggcttggcctaattgcctattgccttcttcttcatttatggctacttgggaccattgtgtaacgaaggttgcaatcatcaagcctctgaaccaacgatgtacttaaaattgtatcatagacaaaatatcataatcaattctttccccatatgttttacgtttttacatcataggcggataggttgttagacatattttgaggaccgtatacatcctctgtgatggcatttttagg

SEQ ID NO: 2078 - DNA, 415 bp, Gossypium hirsutum
  unsure (1)..(415): unsure at all n locations; Clone ID: LIB3493-030-P1-M1-G10
aatagctagagctattgagcttcctagncgatggaaaatgctggtgcgtgctcttatcagagaggttgcgagtaaaactaatgactctgcaggtgatgggacgactacggcatcggtacttgcacgggaaatcatcaaactaggacttttgactgttacttcgggtgcaaatccggtctcagtgaaaaggggtatcgataaaaccgtacaatgtttaatagaagagttggaaaagaaggctaggcctgttaaaggtcgtgatgatatcaaagctggggcttccatttctgctggaaatgatgaccttattggaacaatggtagctgatgctattgacaaagtcggtcccgatggtgttttgtcaattgagtcatcgtctttatttgagaccaccgttgatgttgaggaagggatt

SEQ ID NO: 2079 - DNA, 429 bp, Gossypium hirsutum
  unsure (1)..(429): unsure at all n locations; Clone ID: LIB3493-030-P1-M1-G11
cctattaaccctttttttcttctctgaggtcggttctttcttcttcatcctttctctccatctgcaaatggctcctctcgctgtgatttccttgtccctttgttttctccttccacttctttcccctgccatttcaactaactctgaaggaaatgctctgcatgctttaaggaggaggctttctgaccctaccaatgtgttgcagagttgggaccctacgcttgtcaatccctgtacttggtttcatgtcacctgtgattcccacaatcatgtgattcgcttggacttggggaactctaatatctctggaactttggggcctgagctagctcaactccaacatctncagtacttggagctgtacaaaaatgacataagtggggaaattccaaaggagttggggaatctgaagaaccttgttggcttgga

SEQ ID NO: 2080 - DNA, 522 bp, Gossypium hirsutum
  unsure (1)..(522): unsure at all n locations; Clone ID: LIB3493-030-P1-M1-G12
cggacgcgtgggcggacgcgtgggcttgggcggtcttctctttcttctcaatattttcctctgtggagaacccatccccctcctttagggtttagcagttaaaaagagaaaagcaaaagtatggcgaccgccactgtccccgctgccgcaaggcagctttctcctaaggaagccgacatccaaatgatgttggccgccgaagtccatctcggtaccaaaaactgtgacttccaaatggagcgttacgtcttcaagcgtcgcaatgacggaatctacatcatcaaccttggcaagacctgngagaaacttcaacttgctgctcgtgttattgttgccatcgagaaccctcaggacatcattgtccaatctgcaaggccatatggtcagagagctgtactgaagtttgcacaatacactggttgtcatgcaattgctggaaggcacactcctggtaccttcactaaccagctccagacatcgttcagtgagcctcgtcttcttatcctcacagatcccaggact

SEQ ID NO: 2081 - DNA, 110 bp, Gossypium hirsutum
  unsure (1)..(110): unsure at all n locations; Clone ID: LIB3493-030-P1-M1-G2
cggactcgtgggcggacacttgggctgacgcttgggcttactcataagcggacgcttnnnttnnancctnnatnctctattttnatncacaacaaagttctttctgttct

SEQ ID NO: 2082 - DNA, 358 bp, Gossypium hirsutum
  Clone ID: LIB3493-030-P1-M1-G3
caagagagcagcagcagtctcggcggcggcaggggggccccagggtctatggtggtaaacaaccatcaaacagaaatgaagttcaatattgcaaatccgactactggctgccagaagaagctggagattgacgatgaccagaaactccgagccttctttgacaagaggatctcccaagaagtcagtggtgatgcccttggcgaggagtttaagggctatgtgttcaagataatgggaggctgtgacaagcaaggttttccaatggaagcaaggagttctgactccaggcccgtgttcgtctttttgcttcacagagggtactcccctggcttccgtggggtattggtagggagaaaat

SEQ ID NO: 2083 - DNA, 453 bp, Gossypium hirsutum
  unsure (1)..(453): unsure at all n locations; Clone ID: LIB3493-030-P1-M1-G4
gaaaactcagaaacacgcaggaaacccaaagggtgtctctttttttttccctctttttttatacacaaaggtaataattttcgaaaatggcatttgctgttacctcctctccggctgcaatttctggttccagctnttctcgttcaagtgcctcatctgatctcaaaattccgcaaattggttcatttcggctagcggatcgccatgcaacggtgaatctatctcaaaagcgttgcgcagtgaaacccgtgaatgcggagccaaagagcaacgattccatgctttctcatgctgcaaccacctctgctcctgaagtgtcggaaaaagttgaggtggaggattttgaccaattggccaaagaacttaacaatgcttctccactcgaaatcatggataaggctctggagaaatttggaaacgacatcgctattgctttcagtggagcggaggatg

SEQ ID NO: 2084 - DNA, 355 bp, Gossypium hirsutum
  unsure (1)..(355): unsure at all n locations; Clone ID: LIB3493-030-P1-M1-G5
cgagttcaatggacccggtgttggcattcacnaggatcatgttgtcccagaaggttccgaaattggtactcttggttttggttttgaaggtggtcctgaaaaatgttgttcttctggatgttccggtaattgtaatcctggtggtttcgttctaccatttcctcaaattccagaaatcccaagaattccacagatcccacagatcccacaaatcccacaaattccactaatcccacagatcccacaagtcccacaaatcccactaatgccaggacagtcgggatgtgagagtggggagtgttaccgtcagggttgcggtgggacttgtgctgagtgtggtcagcccaggtgcgca

SEQ ID NO: 2085 - DNA, 230 bp, Gossypium hirsutum
  unsure (1)..(230): unsure at all n locations; Clone ID: LIB3493-030-P1-M1-G6
gttttgtgggagcttgggagtggagaanaaccatatgcagacttgcattacggggctattattggtggtatcgtaagtaatacactacgaggacaggttccagaaggctgtgacccagaatggagatcattgatggaaagatgctggatacaaatgataccagagaagaccgagtttaccgagatagcaaatgagttacggtcaatggcagcaaaaattcaaccaaaggg

SEQ ID NO: 2086 - DNA, 153 bp, Gossypium hirsutum
  unsure (1)..(153): unsure at all n locations; Clone ID: LIB3493-030-P1-M1-G7
ggaagaagcagtcggatgtgatgaggttttgacagattttaaaatacggggaataccnacagcatncntcaattgttaaggtcaaccatcctactcgccctgacaaggcactctctttggggggtaaggccaaatttttttttgtggntnacc

SEQ ID NO: 2087 - DNA, 234 bp, Gossypium hirsutum
  unsure (1)..(234): unsure at all n locations; Clone ID: LIB3493-030-P1-M1-G8
ctttgatttccttctataaaaaanaagaaggaaaaaactgaagaaggaggggactttttnaggaanaactatggctccacctacaagaataggacttgctggtttggctgttatgggccggggggcttgcgcttaatttttttgataaaggcttccccaatactgtttacaacagaactacctccaaagtcgatgagactgttgaaagagctaaacaggaagggggtctttctt

SEQ ID NO: 2088 - DNA, 415 bp, Gossypium hirsutum
  Clone ID: LIB3493-030-P1-M1-G9
ataaacatccaatcaatatacagggaatgaggtctggtgtttcaagtgagaagagggaaggtgtcaagaggagggctgctggagatattgcaccgactgttcggcactacagaagtgtttgagtggacagttacatgggaagtctgcagtttgatgaggatacaccaaaaattcctccttcaggaaatcatggcaatcatcactctcctggtagctcaggcgatgcaaattcaagtaaattcaactttgagcttgggagtagtgagttcaatgaatctgagcttaaaaagatcatggaaaatgagaagctggctgagatggcatctgtagatccaaaacgcgtcaaaagggatttggctaatcgtcaatcagctgctcgttccaagccgcgggagatgcagtacatcgcagaact

SEQ ID NO: 2089 - DNA, 496 bp, Gossypium hirsutum
  Clone ID: LIB3493-030-P1-M1-H1
cccacgcgtccgcccacgcgtccgcttgaatggcgctgctgaagacaagactactggccagaagaacaagattacgatcacaaacgacaagggtcggttgtctaaggaagaaatcgagaagatggttcaagaagcggagatttacaagtccgaggatgaggagcacaagaagaaggttgaagccaagaacgcattggagaattattcctacaacatgaggaacactgtcaaggatgagaagattggttcaaagcttgacccggccgacaagaagaagattgaagatgccattgatggagcaatccaatggttggatggcaaccagctagccgaggccgatgaattcgaggataagatgaaggagctcgagagcatctgcaatcctatcattgccaagatgtaccaaggtgcaggggctgacatgggtggtggcatggatgaggatgccccacctaccggtggcagcagtgccggacctaagatcgaggaagtcgac

SEQ ID NO: 2090 - DNA, 462 bp, Gossypium hirsutum
  Clone ID: LIB3493-030-P1-M1-H10
ctggtgaggcctggggttaccttggtagcagaagatttttacttgaacttgatcagcagtcagatgctgttcgtggtctcaatagctcactgattcagttggtcatggaaattggatcaactggaaagggcttcagtcaagggaacaaaaccttctttgctcacacacaggtttcatctgacacaaatgaagctttggatgccttgaaacttgctcaagagtcccttaaatctgaaggtgttacagtttcaaatgccagctcttctaatcctggaattcctccatcatccttgatggcatttctgagaaagaactcttcaacttctgggattgtgttagaggattttgataccgtttttgccaacaagttctatcatagtcatcttgatgattcagcaaatataaactcttcagcaatagttgcagctgcttctcttgttgctcggactctctatgttcttg

SEQ ID NO: 2091 - DNA, 504 bp, Gossypium hirsutum
  unsure (1)..(504): unsure at all n locations; Clone ID: LIB3493-030-P1-M1-H11
ggtgtttctcacaccgtgccaatctatgaaggatatgcccttccacatgccatcctccgtcttgaccttgcaggtcgtgatctaaccgatgccttgatgaagattcttaccgagagaggttacatgttcaccaccactgctgaacgggaaattgtccgtgacatgaaggagaagcttgcttatgttgccctggactatgagcaggaactggagactgcgaagagcagctcatctgttgagaagaactatgagttgcctgacggacaagtcattactattggagctgagagattccgttgccggaagtcctcttccagccatctttcatcgggatggaagctgctggaatccatgaaactacctacaactctatcatgaagtgtgatgtggatatcangaaggatctctacggtaacattgtgctcagtgggggttcaaccatgttccctggtattgcagaccgcatgagcaaggagatcactgcacttgctccaagcagcatga

SEQ ID NO: 2092 - DNA, 463 bp, Gossypium hirsutum
  unsure (1)..(463): unsure at all n locations; Clone ID: LIB3493-030-P1-M1-H12
agcccatgcaaatctggcttctgcttataagggtagtggacatgtggaggctgctgtcaaaagctataagcaggcattgcttcttcgaccagattttcctgaagctacttgtaacctcctacatacgttacagtgtgtgtgctgcttggaggatcgggataaaatgttcactgaagttgagggcatcatcccaaggcagaataatatgtcaggtcttcctagtgtgcaacctttccatgctatagcatatcccattgatccaatgcttgcacttgatattagccgtaaatatgctgctcattgctctttgattgcatctcgttttgctcttnctcctttcaaccatcctgctccaattcctattaagcaagattgtggaaatcagaggctaaagattggttatgtaagcagtgattttggcaatcaccccttgtcacacctcatgggatcggtatttggcatg

SEQ ID NO: 2093 - DNA, 466 bp, Gossypium hirsutum
  Clone ID: LIB3493-030-P1-M1-H2
caaaattttccctctcatttcctctctggcaggcggcttgagaaatcaaaattcaaaaccctagttagggtttttatcttcctcaatctcccgttgtcacactgcaaatcggccacaatgtcgatgtccaagagttccaaaatgcttcaattcatcaactaccgtatgcgggtcactatccaagacggccgtcagttggtgggtaagtttatggctttcgatcgtcacatgaatctcgtactcggtgactgcgaggagttccgtaagttgccgccggctaaagggaagaaaaaccccagtaccaatgaggagcgtgaagatcgtagaacgcttggtcttgttcttcttcgtggtgaagaggttatttctatgactgttgagggtcctcctcctcctgaagagtcgcgttcaaagtctgccgctgctaatgctgttcctggacctggtattggtcgtgctgctggtc

SEQ ID NO: 2094 - DNA, 519 bp, Gossypium hirsutum
  Clone ID: LIB3493-030-P1-M1-H3
aataaagcgtttgtctcagatttctgaagatggggcgtaccaagcagacaggccgtaagtcgactggtgggaaggctccaaggaagcaacttgctaccaaggctgcccgtaaatctgccccaaccaccggtggtgtgaagaagcctcatcgctaccgtcctggaactgttgctcttcgtgaaattcgaaagtaccagaagagtactgagcttcttatcaggaaattgcctttccagaggcttgttcgtgaaattgcccaggacttcaagactgatttgcgtttccagagccatgctgttctagctctccaggaagctgcagaggcataccttgtgggtctttttgaagacaccaacctttgtgcgatccatgccaagcgtgtcacaattatgcccaaggacatccagttggctcgtaggatcagaggagagcgtgcttaatttccatgtgtgtggatcagtcgcttagaaagaaaaaactattggttattttaggcaaatgtatgggtttttggttttt

SEQ ID NO: 2095 - DNA, 391 bp, Gossypium hirsutum
  unsure (1)..(391): unsure at all n locations; Clone ID: LIB3493-030-P1-M1-H4
tattaccctcacccactccaccctctctttgctgcngtatttccaattgtgagactcaaatctcaaaacgattttagaaagaaaaaaccccccaaaaaaatcaaagccttttttaactttccttcaatgaaacgaaggaccccagattctcaggcaacccgtctccgaccagaaattgaagaaaatcaaagaagatgaagaacctgaggatacaaaatctgggttgatgaatttagatgaaaatcttttgtacgaagttttcaaacacgtcgatgcaaggactttggctagggcttcttgtgtaagccgtctatggcgccaaaccgccaaagacgagcggctttgggagctgatctgcaccaggcacctggctaacatcggttgtggaacc

SEQ ID NO: 2096 - DNA, 488 bp, Gossypium hirsutum
  unsure (1)..(488): unsure at all n locations; Clone ID: LIB3493-030-P1-M1-H5
ttttgattatgtcaaaacacaaattcanaaggtggacctgatgcttcgggaaagtatccatatagcggctctttggactgtgccatgaaaaccctcaaggctggaggaccattcaaattttacaccgggttccctgtatattgtgttaggattgctccgcacgtcatgatgacttggatattcctcaaccagattcagaaggcagagaaaaaaatagggttgtagagcgtggtcacttctcagagacgtggagtaatgctggactaattgattgcgtcaaataaaatcctggtttttgctggttctggctaatcatgcaaattttgaaatacatttcaagtcaatgttgtcttatttttctgattaaatattttagggtgagataggaaaaccatttgcatcccagagttatgatttgattgctcatacttctgattaaaaataaatgtgtaccaaaccaagttcaaagcatttaaactttttttttt

SEQ ID NO: 2097 - DNA, 479 bp, Gossypium hirsutum
  unsure (1)..(479): unsure at all n locations; Clone ID: LIB3493-030-P1-M1-H6
cggacgcgtgggttgaaagtgaagcaagcagtgcggaccaacgatgaagctgagaaagaatgaaaatcgaccttgcaacgcagagagatgaccctaatgacactgaagaacaagttgttaaggctacccggccgcagggaagatataagaaaagagaaagagggaagcttgtacatgcatattcttcgaaggatcttgaaggaattcttgccaaaaaggttgaggagtcaccacaggtaaatcctgacgtggttgctgaaatggaggtcatagagacaactgaaacaaatgatttttccactgaaggaaataaagttgaaagtgtttctccagaatggtggggctttaaatatggatttgtttctggaggttttctgggagaaactacccgaaggaaatcaataaaaactggagaggctaaaaattctactgagagaactgtatnttatgaagatgaccaagagaatctctacaaactt

SEQ ID NO: 2098 - DNA, 313 bp, Gossypium hirsutum
  unsure (1)..(313): unsure at all n locations; Clone ID: LIB3493-030-P1-M1-H7
cgacgcgtgggctgacacttaagttggttgacatttcataaaaggagggctcacaacattctcacattaactcatnatccatctctcaatgacgctgaataacatctttttatgggtgccccnccncatttttttatttttnaaaaganaaagaaacaaactngcacatccatatncttcgaacgatctttaacgaattcttacctaaaaagttgaggagtcaccacaggttaatccttacatatttccttaaatgtaattcatatatacaacttaaacaaatgatttttccacttaattaaataaattttaa

SEQ ID NO: 2099 - DNA, 456 bp, Gossypium hirsutum
  Clone ID: LIB3493-030-P1-M1-H8
gaaagagttaccaaaggtgaatagaagtgagacaccatggttgattgttcttgtgcattgcccgatttataacagtaattcgcatcattacatggaaggtgaaaccatgagagtcgtatacgagtcatggtttgtaaagtacaaagttgacgttgtgttttccggtcacgttcatgcctatgaacgatctaagcggatatccaacattgcatacaatatattgaatggaaagtgtactcctgttcatgacctgtttgcaccggtttacataacaatcggagacggtggaaatcattgcggaccggctttaggcatggtggaaccacagccgaacttctcagcttatagggagacgagtttcggtcatggtatattcgatatcaagaaccggacacatgcttatttcggttggcatcgtaatcaagaccgatacgctggtgaagctgattctttatg

SEQ ID NO: 2100 - DNA, 446 bp, Gossypium hirsutum
  Clone ID: LIB3493-030-P1-M1-H9
gaaaaaaagagagatggcgtctgtaataaaatctgcaatcttaattctgtcggtgtttttatctgtacgcttcagttcgggtgttaggttgctccaggaacagcccaatgatgaccccaaaaacatggacgctattcctcccattgatgcactcaaccctaccgagttgaatggacccggtgttggcattcacgaagatcatgttgtcccaaaaggtgctgaaattggtactcttggttttggttttgaaggtggtcctgataaatgttgttcttctggatgttccggtaattgtaatcctggtggtttcgttctaccatttcctcaaattccagaaatcccaagaattccagaaatcccacaaatcccacagatcccacaaatcccacaaattccactaatcccacagatcccacaagtcccacaaatcccacaagtcccaaaaa

SEQ ID NO: 2101 - DNA, 485 bp, Gossypium hirsutum
  unsure (1)..(485): unsure at all n locations; Clone ID: LIB3493-032-P1-M1-A1
tgtgagtaggccttttgctagatggtttatttggtacaggaagtggctccactgcttcagttgaaaatgcaggtcttttgtgattaacaagagttgggagtcggacagtcattcaaatctcggccgtatttatgcttttcttttctgtattaggaaaattcggggctgttctggcttcaataccattgccaattatggctgctctgtactgcgtcctctttgcttatgttgcttcagcagggctgggtctccttcagttntgcaacctgaacagcttcaagactaagtttatagttggattttctgtcttcatgggcctctccgtacctcaatatttcaaccagtatctactagtatccggtcatggccctgttcacactcgttctacatggttcaacaatgtaatgcaagtaatattctcatccccggcaacagtgggattcatagttgctttcttcttggattgcacccacagctacgggcat

SEQ ID NO: 2102 - DNA, 408 bp, Gossypium hirsutum
  unsure (1)..(408): unsure at all n locations; Clone ID: LIB3493-032-P1-M1-A11
gtcagatttgaattccgttcttgctaaccctagagttcntcgggtttttctcaagtgaagcgccaaagaaaaacaattatgaaaacttttaccctaaggaaaagaaggaaattccaaagcaaaatgaccaaaaacctgactccaaagaggattcgaaggcagatgaccaatggaattttcaggaaactttcctgaagctttttcaaaatttggttacccctttgcttgtacttgcattgtttctttctatgtctccctggactgttgagcagcaacaaattagtttccaagagttcaagaacaagtttctggaaccaggtttagttgaccatatagttgtttctaataagtcagttgcaaaagtgtatgtgaggaacacaccatacaatcaaacaagtgatgatctta

SEQ ID NO: 2103 - DNA, 364 bp, Gossypium hirsutum
  Clone ID: LIB3493-032-P1-M1-A12
atcgatgcccctggacatcgtgactttatcaagagcatgattgctggtacctggcaggccgattgtgctgtacttatcattgactctaccactggaggttttgaggcaggtatttccaaggatggacagacccgtgagcatgctctgcttgctttcactctcggtgtcaagcaaatgatttgctgctgcaacaagatggatgccacaacccccaaatattcaaaggctaggtatgatgaaattgtgaaggaagtgtcttcctacttgaagaaggttggttacaaccctgagaagattccttttgtccccatctccggttttgaggttgacaacatgattgaaaggtccaccaaccttgattggt

SEQ ID NO: 2104 - DNA, 468 bp, Gossypium hirsutum
  unsure (1)..(468): unsure at all n locations; Clone ID: LIB3493-032-P1-M1-A2
cacgccgnntccgcgacctcttaatctnncctcaacnaaaanacaaattgcaggcactgcaagagaagattcattctaaattccgcttgttgccattctgccaattacccttggaaaaattcaagaggaatggtcaaaccctacccgtaaggataaaggttgtaaaactttgggagccaattcagtcaaccctccaaatttctgttgatggattggatccaaattctgtaaagctgtctggatcaacaaagaccactctcacgtctgctaatctgatggatgagaattccttcaaggagccaaagaaggtcgctcctaatcaaacactgctggaagatgcgcaagagatgagtgcgctactgcgaccacattctttcacttcatttgatttgttaaaagagtctgtgaatcttagaattacagaagatgaatcttctctcgtatcttccatctgaaataaaataatgg

SEQ ID NO: 2105 - DNA, 53 bp, Gossypium hirsutum
  Clone ID: LIB3493-032-P1-M1-A3
tccccaatctacccacgcgtccctctcaccatatactttagaaagattgaatt

SEQ ID NO: 2106 - DNA, 375 bp, Gossypium hirsutum
  unsure (1)..(375): unsure at all n locations; Clone ID: LIB3493-032-P1-M1-A5
atttctcaataatttcgcaccctctttggtgcaatggcccctagaacgagcgtagatgaaaaaccatgcttatcannnatantnnatggaaccaccaatttacctgtcgacatttcatcctttgagttgattaagccaagctttgatgagaccaaccagcattgttctcttgatgtcttgcctatcctaattgaggaggcttcatttccagtaagagaaaaaagcaacttaaacacttcacatgtctcggatgcctatagcttttctgtgttgcctgacgaaggaaacatgaatccaaactgtacacgggtgaagagggttgagccttctacaattttccttttttattaaaaatctagatgtgatatgtgtttc

SEQ ID NO: 2107 - DNA, 193 bp, Gossypium hirsutum
  unsure (1)..(193): unsure at all n locations; Clone ID: LIB3493-032-P1-M1-A6
taaacaccaaatatgaagaaatcccaccttttttctcttgttgtctactagcttatacttggatcagtgagcantgatnttatccatgattcttgtgacaaagctgcgaagggtgatcccaatatcaagtttgacttttgtgtatcaagttttgaattttctttttatctaaaactgatactgaagttgctga

SEQ ID NO: 2108 - DNA, 170 bp, Gossypium hirsutum
  unsure (1)..(170): unsure at all n locations; Clone ID: LIB3493-032-P1-M1-A8
ctctgaccatatactttagaaagattgaatttnaacaanangaagctnatttgctaatcactggtaacctggatattggaatctctgctctccnctctaacctcccccccatttacgttgtanaacttgtccttagaaaattggaaaccgatcctctttttttttttttt

SEQ ID NO: 2109 - DNA, 222 bp, Gossypium hirsutum
  unsure (1)..(222): unsure at all n locations; Clone ID: LIB3493-032-P1-M1-A9
cctgactcaagagtcactgaacgagtcnagttcggactcagagtacccaaaatggcatgcgcattgangactttnaaagtaccnnccaactcanccagtttggaaaaacaaggagccgggtcttcgatttcttcagacaagcttgtccatcaatccccacaattatggatatctataacctagacgacctcgtcaccaaatccgagctccgttcttccatct

SEQ ID NO: 2110 - DNA, 274 bp, Gossypium hirsutum
  unsure (1)..(274): unsure at all n locations; Clone ID: LIB3493-032-P1-M1-B11
gcacgatccaagcgttcaagggtggccccatgcgggttgtccgcccnactccggcacctggatccnaaatcnncnncccanaaaaaaagggagaacccgaacgccaattcggagttgccagtccggaaatgtttacattgtgcggcggaaaatactcctcaatggatgactgggccgttgggtccgaaaacattgtgttatgcatgtggggtgaggtccaagtctgtcccattggtaccngatatctctccccccatccagtcccacattttgt

SEQ ID NO: 2111 - DNA, 287 bp, Gossypium hirsutum
  unsure (1)..(287): unsure at all n locations; Clone ID: LIB3493-032-P1-M1-B12
ggaaagatcgaagctccgccaaagaggaanagaaganacatgtatgatttcgatgacagggatgatnacnncnnanacnatnatnagaggccttcaaagcgatagggctaaaagaacaccaccgaatagcttgtgccatgacaaaggtcaaatctctcttcctccctttctctcttttaaaaaacccatttggctttctgtttggtgtgttagaaaaaacaaaaaaaaaaaagtagaaaggatatgatgattattgtatggattcctcattttatttgtcatctttc

SEQ ID NO: 2112 - DNA, 321 bp, Gossypium hirsutum
  unsure (1)..(321): unsure at all n locations; Clone ID: LIB3493-032-P1-M1-B2
gtggatctgaagcaaatgatactcangtgaagcttgtttggtgttataattatgcactttgagagaccagagaanaanaaatttattgctcnanccaaancataccatggttcaacttggatatcanctagtctttcangacttccacctctgcatcaaaacttctatcttccacctccatttgtgttacacactgattgccctcattattggcgctatcatttaccaagtgaaactgaaaaggatttctcaaccaaaatagccaacaatttataaaaccttattctcaaaaagggtccaaagacaattgctggattgatt

SEQ ID NO: 2113 - DNA, 385 bp, Gossypium hirsutum
  Clone ID: LIB3493-032-P1-M1-B3
cccgaatccttcaaacttaacacactcttactacatcatcagaggtttctggtaacacatctgcaccagcttctacaacaactgccccactcttttaatctcatctaaagtaccatctaaatctccctgcactgactgctacatttctgacaacatatgaaactagtgctccactcaattgcttgaacaatacaagctcaatgtccctcatactcttaattgttctaccctttatttttcacctcccatggatctcataaacctaaaggcatgacccaatgacggcgaactatcttttttgttaaaacttacagccttctttctatctttactgaacaacaacaactacgataatctatgtcatttagttctgtttacttatcaa

SEQ ID NO: 2114 - DNA, 306 bp, Gossypium hirsutum
  unsure (1)..(306): unsure at all n locations; Clone ID: LIB3493-032-P1-M1-B4
catatttgccctttcattgcttacttgcctgccttaaacctagttcaagcgtaaacatgacgactgagatgataatggttnataaaatcccttttcctccacaaatcacaactaccaagccactatctcttttgggtcatggaattaccgacattgatattcactttttgcaaatcaagttcacagcaattggggtttaccttgaacctgaagttgtagggcatttacaacaatggaaaggtaagcctgggaacctgctacctgaagataatacttcttccaggctcttattaatgctccactgga

SEQ ID NO: 2115 - DNA, 448 bp, Gossypium hirsutum
  unsure (1)..(448): unsure at all n locations; Clone ID: LIB3493-032-P1-M1-B5
cggacgcgtggggttttgttgaaagctatatatgatgagtaagcctgctgagtcttctgtggccaagaggttanaangcaangtaccattgataactggtggtgcaagtggcataggagagagcacagctaggctgtttctcaagcatggagccaaggttcttattgctgatatccaagatgaattaggtcaatctctctgcaaagagctcggaaccccagatatcatcagctatatccattgtgatgtgacgtgcgaaacggatgtccaaaacgccgtggacttagcggtctcaaggtatggtaagcttgatatcatgttcaataatgccggtgttgcaggggaggatgaattgagagccattgcttcagaatgtgataactttaagaggggccttgattttaatgtagtttgttggttatttatattactatatatattaatatgt

SEQ ID NO: 2116 - DNA, 301 bp, Gossypium hirsutum
  unsure (1)..(301): unsure at all n locations; Clone ID: LIB3493-032-P1-M1-B6
attcaaaatcaacccacccntccaaaaaaagttgaaacatcagccatggagattcaacaagttcatagattagatgtaaaacaatgattatgcatgaactantanttactatacattattaccttcaagtaaataatgccgagagaactgattgttaattaagattgccttgtttgaagcagcatcatgaatatatatatatgcttgcttacaaggtttgtctctcagagtccttctctttgtactctttccagcttaatgtataaactgtctacttaaaaaanaaaaaaaannanaaaaa

SEQ ID NO: 2117 - DNA, 217 bp, Gossypium hirsutum
  unsure (1)..(217): unsure at all n locations; Clone ID: LIB3493-032-P1-M1-B8
tggaagaaactggagtggtgctccaaataatccaggccntatgaagaccatgggacaccggattccacacaanaaatnntatcttacaccttctntnntctctatnatnanaagacttcttccatttnnnagcatattcatggaaatntattttnttttttcatccttctnnaattacaaaaactattacttctattcttttattctccttctcttc

SEQ ID NO: 2118 - DNA, 346 bp, Gossypium hirsutum
  unsure (1)..(346): unsure at all n locations; Clone ID: LIB3493-032-P1-M1-B9
cctcacctcgcagtctctaaacaaccaaacacaggcctacatgttanaattttttatttggcgaatctncnnncnnanataatgatgcacaaatttattccggtcaggaggttattttcggaaactaaatgttctctcccttgccaactacgacgacgttgcttctctcaggtggctcgaaatgagattgataacagggatggtcttgttcgtaaaatgcctccttttgattactctccgcctgcttacaccggtccttccgccgacgagatcctttcaaacgcaaggagtatcttagcccctccatgttttacttttacaccaaaccattgaacataatggaagg

SEQ ID NO: 2119 - DNA, 308 bp, Gossypium hirsutum
  unsure (1)..(308): unsure at all n locations; Clone ID: LIB3493-032-P1-M1-C1
gaacgttgctgttaaagatcttaaacgtggttttnttccttgggactccttgtataattcggacaaggaggctnccaacttcacctcacangttatcatcattaaccaccctggccaaattggaaatggttatgccccagtcctcgactgccacacctctcacatttctgtcaaattttctgagctattaaccaaaattgacagactatctggcaaggaactctagaaggaacccaagttcttgaagaacggtgatccacgtatggtaaatattattcccaccaaacccattgtggtttaaactttct

SEQ ID NO: 2120 - DNA, 223 bp, Gossypium hirsutum
  unsure (1)..(223): unsure at all n locations; Clone ID: LIB3493-032-P1-M1-C10
aaaaaaaaagatggcgtctgtaataaaatctgcaatcttaatgctgtcaatgtggatatgggtaancttcanttcnnntnttnnnttnctccannaacancccaattatnacctcaaaaacatctactctattgctccattgatgcactctttttttttctatttcaatggaccacaaataagcattcactaatatcatgttctcccaaaaagttcctaaatt

SEQ ID NO: 2121 - DNA, 453 bp, Gossypium hirsutum
  Clone ID: LIB3493-032-P1-M1-C11
agactcggtacgatgatgtgaatcttatcactatgcgtgaggacactgaaggggagtacagtggactcgagcatcaagtagtgagaggtgtggttgaaagtctcaagattattactcgtcaggcaagcttaagggtggctgaatatgcttttcattatgctaagacccatggaagagagagagtttctgcaattcataaggccaatattatgcagaaaacagatggtctttttcttaagtgctgtcgtgaagttgcagagaaatatcctgagataacttacgaggaagtagtcattgacaattgctgtatgatgcttgtgaagaatccggcactttttgatgtattggtgatgcctaacctctatggtgacattatcagtgatctttgcgctggattgattgggggcttgggcttaacacctagttgcaatattggcgagggaggaatagcac

SEQ ID NO: 2122 - DNA, 306 bp, Gossypium hirsutum
  Clone ID: LIB3493-032-P1-M1-C12
caattttctgttattttctctctcgacaaacagtggaagcagtctttgaatctcgatcgagaagcaactggagttaccatacactcaagaatttccgtcagatttctcccgtcgttcaatctcatctcaaaagggtttatttgaccttatgttgtgccctggttgcctctgcttttggggcttatcttcatatcttatggaacattgggggttacctcacatcattcgcatgcttcggaaccatgatttggctcctctctatccctccttatcaggaacaaaaggaaagttcccttctgatggcat

SEQ ID NO: 2123 - DNA, 435 bp, Gossypium hirsutum
  unsure (1)..(435): unsure at all n locations; Clone ID: LIB3493-032-P1-M1-C2
gaaagattcgatctcttttgctagaaacgggactgaatggcggtccaatgagtgaaagtaggcaacgtgttctttggtgcatctgaccaagatattaangagttcttttcgttctctggtgacatcgaacatgtcgaaatgcatggcaataacgagcgatcgcaagttgcatatgttactttcaaggatccacagggagcagaaactgctgttcttctttcaggggcgacaattgtagatcaatcagttaccatagagctggctccggattacaagccacctgctactgcctctgcaacacctgcaacacagaacaaagaggccggccaggccgaatctgctgtccagaaggcagaggatgttgtaaccagcatgctagccaagggtttcattcttggcaaggatgcagtgaacaaagcaatagccttttatgag

SEQ ID NO: 2124 - DNA, 358 bp, Gossypium hirsutum
  Clone ID: LIB3493-032-P1-M1-C3
gttaaaaacatccttacccttcatgttcttttagattattatgagccacagaaactccataaaatttgcgatggtactacacttactactactctttaccaaaccaccggaaatgctcccggaaatttgggtttcgttaatatcaccgatctacaaggtgggaaagtcgggtttgggtcagccgttcctgggtctaaacttgattcgtcttatactaagtctgttaaacaggtaccgtataatatttctatactggagatcaatgcgcccattattgcttcccgtgttttaatagcttctgcaccctcggcttccggtgtttaacattacccgcttactttaaaaaaaccttgttgtt

SEQ ID NO: 2125 - DNA, 118 bp, Gossypium hirsutum
  unsure (1)..(118): unsure at all n locations; Clone ID: LIB3493-032-P1-M1-C6
cttcctcttcctctagaaggggataattaataaattactgtcgggcgaagaaaaaattaagagatggctcnattaatgttaatatcnatgctatttctcttggcaggatcaatgctta

SEQ ID NO: 2126 - DNA, 238 bp, Gossypium hirsutum
  unsure (1)..(238): unsure at all n locations; Clone ID: LIB3493-032-P1-M1-C7
tagggaaagctcatacgcctgcgagctacctttccaaaattccccactctacccacacgtcctaaagccttcccaaactcagctcacacccacagaaggagacatgaggataaaacataacttgtancaaactcnnttcttnaaatggcatcnaagttgtctgactcgtgcaaatcagcgacggctactcttttctgccggactgactcaccttttatattcttcttctattacttca

SEQ ID NO: 2127 - DNA, 148 bp, Gossypium hirsutum
  unsure (1)..(148): unsure at all n locations; Clone ID: LIB3493-032-P1-M1-C8
gcaaaacatggcactacaactggtgtgtcancacgtnatagagcaacaactagattggcggtagcttctaaagattccaaaccctangatttcaaccgcccangtcacattttcccactgaagtacanagaaggtggtggggtaaaaa

SEQ ID NO: 2128 - DNA, 227 bp, Gossypium hirsutum
  Clone ID: LIB3493-032-P1-M1-C9
attgccaccggttgttcctccaatattcaaaccagccattgagctacctccggttacagtgcctccaattaacctccctccaagaacacttcctccattaactaatccaccaagtgagaaaccctacccaacaccaccaaccaaggacacttgccccattgacacactgaaattgcgtgcttgtgtggatctgctgggagggttggggcacattgaactaggtgacc

SEQ ID NO: 2129 - DNA, 297 bp, Gossypium hirsutum
  Clone ID: LIB3493-032-P1-M1-D1
gttcaacttaatttctcatttttctcgtaagccttccaaaaagagaaaatgtaaattctgttcttctatggtcaatcaataaaggaatttaagacgacgagtcttttttcttcttttttttttttagtaattttatctggttggaatcggaggtggaggaggaggaataggggctgattttacctttcttttttcttaattttaggtaatttaggttttgagattccgggggtgtattaattttaactttataactggtttaattattggattaaggagccatagtgtggatgatgt

SEQ ID NO: 2130 - DNA, 393 bp, Gossypium hirsutum
  unsure (1)..(393): unsure at all n locations; Clone ID: LIB3493-032-P1-M1-D10
ggcctcgccaccgatgctcaaaccttgtatcaaaggcttgtgtttcggcacaagctgtgtgagctaanagaagaaagagacatgaaacctgagacttttgctaaccttgtttctgcgattctttacgagaaaaggtttggtccatacttctgccaacctgtaattgctggattaggagatgaagacaagcccttcatttgcaccatggattccatcggagccaaggagcttgcgaaagattttgttgtagctggcactgcctcggagtctctctatggtgcctgtgaatcaatgttcaaggagggcatggaacctgaggaattgtttgagacggtttcccaagctctcctttcatcagtagatcgtgactgtctgagtggttggggaggacat

SEQ ID NO: 2131 - DNA, 479 bp, Gossypium hirsutum
  Clone ID: LIB3493-032-P1-M1-D11
cccacgcgtccgggaagctttgttaaagagagaggccagtcgtttacatcataccactgtttatgatcgccattctgctcttcatatagctgctgctaatggccagatcgagattttggccatgcttttggataaatccatgaacccagatgcggtgaatcgtaacaagcagactccacttatgttggctgcaatgcatgggaagatctcctgtgtgaagaagctcattgaagcgggggccaatatcttaatgtttgattccctccatggaagaacttgcttgcactatgcagcctattatggccactttgactgccttcaagccatcctctctgctgctcaatctagccctgttgctgtttcatggggatatgcacggtttgtgaatataagagacgctaggggagccactcctttgcacttagcagctcgtcaaagacggcccgaatgcgttcatatcctgttagataacggtgctc

SEQ ID NO: 2132 - DNA, 152 bp, Gossypium hirsutum
  unsure (1)..(152): unsure at all n locations; Clone ID: LIB3493-032-P1-M1-D12
ggcatttagacatctgatggctgcaatgcctaagaatatatgantaaccgagaggctggtggaactncannncctnnangaananaanaaaaaggccatggctcgaaatttcacttgcttatatgctttgggtggcgacgtgatcctaattt

SEQ ID NO: 2133 - DNA, 234 bp, Gossypium hirsutum
  unsure (1)..(234): unsure at all n locations; Clone ID: LIB3493-032-P1-M1-D2
cccactcttccaaattttaactcctcctcaaatatccccntctccacanccatgggtaccaagtcaacaaatacatagcctgtttgtancactgaacaangnccatgttgtaaccaaaaanganttggcaccacgcccctctaatcgaaaaggaaaaacgagcaaaagagtccatttcttgaggaacttgatcagggaagatacctgtttttcaacctatgagaagaggatcac

SEQ ID NO: 2134 - DNA, 175 bp, Gossypium hirsutum
  unsure (1)..(175): unsure at all n locations; Clone ID: LIB3493-032-P1-M1-D3
ggagcttttaacaacttcagttgcaacggggggttgccatccgaagccttggatacatgaaatatagcggcnncctcnatacnnangantcatacccttacactgcaacaaatggtctatgcaaattctcttctgaaaatgtgggtggaaagtcctttacttttttacattacct

SEQ ID NO: 2135 - DNA, 198 bp, Gossypium hirsutum
  unsure (1)..(198): unsure at all n locations; Clone ID: LIB3493-032-P1-M1-D7
aataaatttaaaataaaaataaaactcaccangctggaangtagtnaatgaaaagccaggggcttcntcaaatctctaactccctattactattcttctcttctaaaatttactgaaagaaagcttcttcttttttctatcggaggcttatgatcttttctaatggctctattggaacctattctcacttgactttaa

SEQ ID NO: 2136 - DNA, 292 bp, Gossypium hirsutum
  unsure (1)..(292): unsure at all n locations; Clone ID: LIB3493-032-P1-M1-D9
gcagaagtacactcaaagcggangtgttangccggttnntcgatcaactctgagaacggggtgcnatccctactcctntntcccttctctatattacacngatccctcgttgacacttttatcttcacccgggtgggggggagcatattattttctttttttcatagcaccatttgacaaggagtcctcatctcatttaaaccatccaaactgcaaactgccaaaaaattgttttcgctgccaacaacagcctccttgttttccgggaaacaaacccctggtcttccttttt

SEQ ID NO: 2137 - DNA, 236 bp, Gossypium hirsutum
  unsure (1)..(236): unsure at all n locations; Clone ID: LIB3493-032-P1-M1-E1
cccacgcgtccgatcgatttgttcatgtcataaagaagctaaggtangtggaggttacacttatccaagatgcaaancccntgcatgtgagcttcctaccgaatgctgtgtctgcgggttgacactcgtgtcttcaccccatttggctagatcatatcatcatctctttccaatagcaccatttgacaaggtgacctcatctcatttaaacaatccaaactgcaaactgcaaagaa

SEQ ID NO: 2138 - DNA, 231 bp, Gossypium hirsutum
  unsure (1)..(231): unsure at all n locations; Clone ID: LIB3493-032-P1-M1-E10
aattccccnntccacccacccctccnagtgaatgtcttcttctatnaanaaaaactnaaagaangttgtttacatttagaaactggctctcnncctntcnncnncttcnnatctttcaatcatcattttgtctntacactattcttcctcaaaatcatgcctggctgaactctcttttttctttttcttcaagcacacacaaaaacatattgttcttcccatcttttacca

SEQ ID NO: 2139 - DNA, 264 bp, Gossypium hirsutum
  unsure (1)..(264): unsure at all n locations; Clone ID: LIB3493-032-P1-M1-E11
cctgaatcgtggcaggattccagctattgtggaagatgtcctgagtgatcatcgtttcaagttgttnatcccaaaggaaacttgtagcattgccttttcattttctggtgtcagatgtcctggtcgcgaggagccctactcagatgaagccatagctctgatgagacgaaagatcatgcagagagatgtggtggttgaagttgaaactgttgatagaactggaacatttttgggatctttgtgggaatcaaaaaccaatgtggc

SEQ ID NO: 2140 - DNA, 162 bp, Gossypium hirsutum
  unsure (1)..(162): unsure at all n locations; Clone ID: LIB3493-032-P1-M1-E12
cggacgcgtgggaaacactanaanaaggtttantgttacatgcantacttgttgcggtgtccttaanttnntttccattattctcatcntntgcattgcngtnatnggtgcaccctangctgncaaatccggggtgacgtgcagctattttttttttttttt

SEQ ID NO: 2141 - DNA, 393 bp, Gossypium hirsutum
  unsure (1)..(393): unsure at all n locations; Clone ID: LIB3493-032-P1-M1-E2
cagacgcgtagatttttttttttattcatataacaaacaaaagcatatatgttacaatgtacatgcagtgattacatattnctacaaaacaagattcacgaaactttatcatattgacaatcaaatatactattcagctatcaattcttcataattactctttttattcaacagaatcttataacaaaccattctgcaacatcattacttcttatttagtataattaatacaacgacaaccaactcttcctcattatttcatcttaatatgggatcatctccctactttggtggactgggttcactgtccataacctcttctatccctttgctctttacaatttcagcctggcaacatcctgattcgcacctgggctgaccacacttaccaca

SEQ ID NO: 2142 - DNA, 191 bp, Gossypium hirsutum
  unsure (1)..(191): unsure at all n locations; Clone ID: LIB3493-032-P1-M1-E7
atccgcctctctcatcttccgttgtttatacgttgggttgggggttaanaagtgatactagcatnnctacaaanaataacntttnnnacttnaaagaagctgatttgaatggaaagaaagtgtttgttacagtcgatctgaacgatccattggattattactctaacataactgatgacacaaggatccct

SEQ ID NO: 2143 - DNA, 524 bp, Gossypium hirsutum
  unsure (1)..(524): unsure at all n locations; Clone ID: LIB3493-032-P1-M1-E9
tcactcgacccactcatcctcttactccattgcaaaaatagctttaaccttaaagtgcataganaaacttctagaatgtggcaatctttnttctactcacctatttctctaaccatcttgctcaaacaccttgtcacctataaaacaattgctttgaagaagattcgcttatatctttaatactacggtgtacctaacactgcaattagagaaatctctctcttgaaggaaatgcaacatggtaatatcgtcaggttgcatgatgtagtgcacagtgagaagcctttatatttggtatttgaatatctggacttggatttaaagaagcacatggattcatgtccaaaatttgggaaagatccacgaattataaaaacattcctttatcaaattctccgtggcctttcttattgtcattcttatagggttcttcatcgagatctaaaacctcaaaatttgcttatagatcgcccttccaatgcactaaaacttgcttatttttgtcttcccccacattttgtatt

SEQ ID NO: 2144 - DNA, 512 bp, Gossypium hirsutum
  unsure (1)..(512): unsure at all n locations; Clone ID: LIB3493-032-P1-M1-F1
cttgagcttatttgtacattttgattcttctcgtctggtggagctgcacagggaccagtacgagaaagtagagaagattgntgagggaacctatggcgttgtttataaggctcgtgaccgtgtcaccaatgaaacaattgctttgaagaagattcgcttagagcaggaagacgagggtgtacctagcactgcaattagagaaatctctctcttgaaggaaatgcaacatggtaatatcgtcaggttgcatgatgtagtgcacagtgagaagcgtttatatttggtatttgaatatctggacttggatttaaagaagcacatggattcatgtccagaatttgggaaagatccacgaatgataaaaacattcctttatcaaattctccgtggcgttgcttattgtcattctcatagggttcttcatcgagatctaaaacctcaaaatttgctgatagatcgccgtaccaatgcactaaagcttgctgattttggtctggcccgagcatttggta

SEQ ID NO: 2145 - DNA, 231 bp, Gossypium hirsutum
  unsure (1)..(231): unsure at all n locations; Clone ID: LIB3493-032-P1-M1-F10
cccactcttccgcccaacgtccgctccnatatagtngcttgagaaatctgggagttaggcnttccctctccattaattcatacaaacacngtatagggggagcggtgaaacattgacaatggggagagcaagagaatttttttatttttatttagaaataaaaatactcaatgtactatcatatatatgaccaaaaaataaatgaatctattcaatcctttaaaaaaatta

SEQ ID NO: 2146 - DNA, 373 bp, Gossypium hirsutum
  unsure (1)..(373): unsure at all n locations; Clone ID: LIB3493-032-P1-M1-F11
ctggtccttccctcaccccaattgtccccagcaagataggcgttgctacatgtgtgatttcaggcaatgaattcctcataaatgctttgaaaggaatgcagatgctgtcaggttcgatctctatcacacatgtggaagacgtatgccgagcccatgtttttctggctgaaaaagaatctgcatcgggtcgatatatatgcagtgctgtcaataccagtgtgccagaactagcaaagttcctcaacaaaagataccctgacttcaaagtccctaccgattttggagatttcccctccaaacccaagttgatcatttcctcagagaagcttattagcgaaggattcagctntaagtatgggatcgaggaaatcta

SEQ ID NO: 2147 - DNA, 341 bp, Gossypium hirsutum
  Clone ID: LIB3493-032-P1-M1-F12
ctgctcaaagctgctattagagatcctgatccaggtgttttggttgaaaacgagttgttatatggtgagtcattccctgtttctgatgaagttcttgattccagtttttgccttccaattgggaaagctaagattgagagagaaggaaaagatgtgactattacagctttttcaaaaatggtgggctatgcacttaaggcagctgagatgcttgaaagggatggaatttatgctgaggttataaatttgcgttctattaagccgctagatagatccacaataaacacatcagtcaggaaaaccaacagactaataacagttgaagaagggtttcccagcac

SEQ ID NO: 2148 - DNA, 447 bp, Gossypium hirsutum
  Clone ID: LIB3493-032-P1-M1-F2
gtggtgacagtgggcggttggatgagaaatttggttaaaacggtgtgcgggattgaacttcctatccgaccattggaaaccaatgtatgttattggcggattaaggacggacacgaggtcgagtatacaattggaaatgattttccgacgttcgctagctacggacatccatacatttatggaacaccgtcactggagtacccgggattgattaaagtagcagtacatggaggctatcaatgtaacccagacaaaaggccatggggaccaggacttgtgcccgactcattaaagcaatgggttgagcaaagattcaaagggaaagtcgattcgagcaaaccagtcataactcaattgtctgtgtactcgatgacacctgatgaggatttcgagatcgattttttgggaggggagttcgggaaggatgtggtgatcggaggtgggttt

SEQ ID NO: 2149 - DNA, 375 bp, Gossypium hirsutum
  Clone ID: LIB3493-032-P1-M1-F3
ttaccattcatagcatagcagcttagtccaactccacacccagcaccatgggctgtttgtgatcatccgaaaaagaatggtaaccgtggaagaagttcgtaaggctcaacgtgcccaaggccctgccaccgtgttggccatcggcacatcaaccccgcctaattgtgttgatcagagcacataccctgactactatttccgtatcacaaatagtgagcacaagaccgagttgaaagagaagttcaagcgcatgtgtgaaaaatccatgatcaagaagcgatacatgtaccttacagaagagatttttaaagagaatcccaatgtatgtgaatacatggctccttcactggacgctaggcaagatatggtggtagt

SEQ ID NO: 2150 - DNA, 136 bp, Gossypium hirsutum
  unsure (1)..(136): unsure at all n locations; Clone ID: LIB3493-032-P1-M1-F4
cggacgcgtgggcaacaaagaagtatgttggccccaaaagttgggcacagtaaacacatagaacctgttcacttttaannaaatttcttgatgtggttgangaagtacagatagcacaattagagattagaaatat

SEQ ID NO: 2151 - DNA, 222 bp, Gossypium hirsutum
  unsure (1)..(222): unsure at all n locations; Clone ID: LIB3493-032-P1-M1-F5
acaaagagagcatctcatcgcattttattgtgcttctctctcagatcttgagagaaaatacagcaatgaaaaanatccacaaacataangatnttnaaccaacanaatttnangaatcaattncccaaacattcttcnatttggagaataccaaccattatcttaaaatttacctcaaagaactctacattaattcagcagtccaaattgatgtgtctggca

SEQ ID NO: 2152 - DNA, 249 bp, Gossypium hirsutum
  unsure (1)..(249): unsure at all n locations; Clone ID: LIB3493-032-P1-M1-F6
gtgaaattgaaaatcctgctattactgctgttaaaaagcancganggagggattacaaaggagatggtgctcttcttnntattcaattcnattcacttcctcctggtgcattctagttcccaagtagcantccggtcaatgagccaatgtacgttgtatataccctacagacccattctacaaatatctctggagttataaagcatccgagcaacattttaaatgtacataattccaagattatttctc

SEQ ID NO: 2153 - DNA, 68 bp, Gossypium hirsutum
  unsure (1)..(68): unsure at all n locations; Clone ID: LIB3493-032-P1-M1-F7
tatacgacgtcactatnagggaaagcttggtgacgcctgcgggtgacacggtccagagaattcccggg

SEQ ID NO: 2154 - DNA, 439 bp, Gossypium hirsutum
  unsure (1)..(439): unsure at all n locations; Clone ID: LIB3493-032-P1-M1-F8
cggacgcgtgggttagcatcgggctgtgcactccgacacttgctcctttattgcaccctggtaaaccctccanactccaccaccgttcaactaccgtcgtctgctccgccagtaaatgggccgagcgcctccttgctgacttccaatttctccctgcccccgataattccgtctcctcttcttcctcctcaaccgccactctttctcccccttaccctccccttctcgccccttctcctcccgaacgccacgtttccattccccttgatttctacaaggttttaggagccgagactcatttcttaggtgatggaattagaagagcctatgaagcaagggtttcgaaaccgcctcaatatgggttcagtcaagacaccataattagccgaagacagattcttctagctgcctgtgaaaccctatctaaccctggctctag

SEQ ID NO: 2155 - DNA, 135 bp, Gossypium hirsutum
  unsure (1)..(135): unsure at all n locations; Clone ID: LIB3493-032-P1-M1-F9
gaaaaagaaagagagatccaaaaattcatcatcaggatcaaaagttatnaatggagatgagagatnctnttncaaaaaaaacacnnantangaaagtataaantggaatcggaaggtgtagttattgangaaagg

SEQ ID NO: 2156 - DNA, 269 bp, Gossypium hirsutum
  unsure (1)..(269): unsure at all n locations; Clone ID: LIB3493-032-P1-M1-G1
aaaaataaaaaaatattaaaaaataaaaaaaaaataataataaaaaaaaattgtaaatttttaaaaatagagatttanntaaaattntattatatataaatanttttagttttttttattttaaattaactaatcttttttattgtttcctaataagtatttttttttttcttttgtaaaccaaattaaactattttttcccacccctttccccttttttcccttccaaaccctttaacctcctcccccttttctccttcttccctttc

SEQ ID NO: 2157 - DNA, 409 bp, Gossypium hirsutum
  unsure (1)..(409): unsure at all n locations; Clone ID: LIB3493-032-P1-M1-G2
tttcattattacacacctctttccattacttctctgaccaaagctccgccgctgacaccacctgcaggcgccaatgtccatcgcccccttccttctcaccccttccccactttcctctcctaattcccttaccatcacccctaaattccccaccactttccctcttcacctgcacctncgcctttccttctccgccacctgtctccgtcacaaccgatcttcccctttcttaaccttctgcgccggccgcgatggtggtgatattaacagcaataacaactcgggtggcggcggtggaaacgatgagaatggaaaacacaggggtggtgatgactagaatgccggttacaagaacaggaaagaagcgatgattgtcctggccgaggcaaggaggtcaaccgaaaatctt

SEQ ID NO: 2158 - DNA, 529 bp, Gossypium hirsutum
  Clone ID: LIB3493-032-P1-M1-G3
cttcactctccctctgtcttcaagaaatggatcgtagaagtgcgtttgcaggtgttttgatttgttttgtggtgaccgctgttggtggtcaatctccggcagcctcacctactaaagctccgccggccgcgactactcctgctactgctcccgctactgcccctgttagcaaacctaaatcaccggctccaactgctgcccctaccacttccccaccaacttcttcaccaccggttgcggctccggagaagtctgcggcggttccagccccatctaaatctgctccgtcttctcctccggctgctgctccggtgagttctccaccggctccagtacctgtgagctctcctccaaccagatcgccttccgttgctgcaccgacgactccaccagaaagctcggcctctcctcttgctcctgttgcggcaccaactactgctgaagttcccgccccaacttcaagcaagaaccagagccaaagccagaaatccaaaaaacaccatgcttccgcttctttacctgatatgct

SEQ ID NO: 2159 - DNA, 346 bp, Gossypium hirsutum
  unsure (1)..(346): unsure at all n locations; Clone ID: LIB3493-032-P1-M1-G4
ctttgacaaaggagagcacanaananagtgttcttgttcttgttcaagtgattgatcaatggctacggatgttgangtttgtggtaagttccaagccaaggactaccatgatcctncaccagctccattggtagatgcccaagagttaactcagtggtctttttataaggctataatagctgaattcattgccacccttttgtttttatacatcactgtgttaacagtgattggatacaagagccaagttgatccagataagggtggtcaagattgtgatggtgttggcattcttggtattgcttgggcctttggtggcatgattttcatccttgtttactgcact

SEQ ID NO: 2160 - DNA, 553 bp, Gossypium hirsutum
  unsure (1)..(553): unsure at all n locations; Clone ID: LIB3493-032-P1-M1-G7
gttttgtttctctttagtttacgtttttttgtccgtttggatgttttgatactaaaaaagggaagcaaagaaaaagggaaatggagggcaaagaagaggatgttagattgggagccaacaagttcacagagaggcaaccaattgggaccgcggctcagactcaagatgacgggaaagactattctgaaccaccaccgtctccatttttcgagcctggcgagttaacctcatggtccttttatagggctgggattgccgagtttgtggcgactntccttttcttgtatatcactattttgactgttatgggagttgttaaggaaaaaactaagtgcccaactgttgggattcaagggattgcttgggcttttggtggtatgatctttgctcttgtttactgcactgctggcatttcangtggccatatcaacccggcagtgacttttggactgttcttggcgaggaagctgtcgttgacgagggcaattttctacatggtgatgcagtgtttgggcgccatatccggggcgggtgtggtgaaaggtttcatggg

SEQ ID NO: 2161 - DNA, 118 bp, Gossypium hirsutum
  unsure (1)..(118): unsure at all n locations; Clone ID: LIB3493-032-P1-M1-G8
cttattgaaatctcaactcctcttgcaagcaggcgctctcctgttgtacatgggaactgcgttggagatctnatccaaaattcatgcactgatagagagtgatttttccatttttttt

SEQ ID NO: 2162 - DNA, 609 bp, Gossypium hirsutum
  unsure (1)..(609): unsure at all n locations; Clone ID: LIB3493-032-P1-M1-G9
tatacactactatagggaaactggtgcgcctgcggtacctgtccaaaattcccactcgacccacacttccgacgatttcatatatgataacatcttcatcggcaaaggatcctctggactcgcgagtcatatcaccgaattcatctcattactatagtccagatcctaatactctagataaaccattaggttacagcggagagagctatgctttccactgcaaaaactccaacgcagtcttgtccattttgttgcctacacttccactaatgagatcatgcatgctgtcaagaatcttggaagaaaaatgggatgaaattactctactgaattcaagtggagcaggttatggcttaatcagccttggagggtatgaacaggatgaaatggatcaccttataaaacttactgatatcgagaagcatatgtatatggcagctgcacctgaccctgatatcataatacgtacttctggtgagacacgtttgaacaattttcttttattgcagagtgcaaactgctatttatacttcccttccgntctttggcccggaattggttttcgtcaatttctgtggcccctattgaattttcatccaattcattttt

SEQ ID NO: 2163 - DNA, 512 bp, Gossypium hirsutum
  Clone ID: LIB3493-032-P1-M1-H1
gaagtcctgaagaagttcaatcattaatggacttgatgctaaagaagattgaagagatactcaagaaacagagcattgtcaaccgctatggtgttagagttatattttcagggaacctgaaactcttgagtgaaccagttaggttggcagcggagagagctatgcttgccactgctaagaactccaaggcagtcttgtccatttgtgttgcctacacttccactaatgagatcatgcatgctgttcaagaatcttgtgaagaaaaatgggatgaaattactctactgaattcaagtggagcaggttatggcttaatcagccttggagggtatgaacaggatgaaatggatcaccttataaaacttactgatatcgagaagcatatgtatatggcagctgcacctgaccctgatatcataatacgtacttctggtgagacacgtttgagcaattttcttttatggcagagtgcaaactgctatttatactcgccttcggttctttggccggag

SEQ ID NO: 2164 - DNA, 279 bp, Gossypium hirsutum
  unsure (1)..(279): unsure at all n locations; Clone ID: LIB3493-032-P1-M1-H11
cacagccgtcccgttcgctatgctagcnnattgtggagaatgcattcactggtatgtgcttcctgtggcatagggagagagcagcgtgactgaaatttactgnnacctgnnnttgtcagaaaaacaaggagaaaannccacttattcctagtgnnngtcttcctcctnnngcagttgagaaaaagtntgcttcttggcttgcttttcgagtattgactnnntcagaagccgtccctttaattgaaaagacatttattgcnnatgttgtttaaaaagctc

SEQ ID NO: 2165 - DNA, 118 bp, Gossypium hirsutum
  unsure (1)..(118): unsure at all n locations; Clone ID: LIB3493-032-P1-M1-H12
ttaaaatggctgttaccttctttaggagactcttggtagtcagcccanctaccgttaacagtgcatttcaaggtcaacccaagtccggttttgctggatttcgcttctgtaccatcgc

SEQ ID NO: 2166 - DNA, 497 bp, Gossypium hirsutum
  unsure (1)..(497): unsure at all n locations; Clone ID: LIB3493-032-P1-M1-H2
cggacgcgtgggttgaacagctggtagccaaagtangtgacagtgtngagggagatactaagataggtggcatttcaaaatctggtggtgtaactcatgttgctccatcagaagacaagcctagcaaggaagcctctgagccctgtcctgcaaaagcaaagaaagttgagacgaagaagcctaaagcagaaactccacccagcaaagaaaagcctacagcaccttctctgcctcctcccaaaccttcagccaaggaacctcaacttcctcctaaagagagggagagaagagtacctatgactagacttagaaaacgtgttgcaacacgtttgaaggactctcaaaacactttcgcaatgttgacaacattcaatgaagttgatatgaccagtttgatgaaacttcgttctgactataaggatgctttttttcaagaaacaatggattaaattaagacttatgtttggatttttaaaagcaagtttttatctcttttt

SEQ ID NO: 2167 - DNA, 271 bp, Gossypium hirsutum
  unsure (1)..(271): unsure at all n locations; Clone ID: LIB3493-032-P1-M1-H3
gatttttcttggttggcatatgtctcaaaggcctaacgttccgcactattgttcaatagctgttggtctccattctcatctcctggtttccagtgagatgaaccctaattccaactggtcttaatagtttcatctctttctttttcttctattgattttttgttttaattccttttattgcctttctgaaaaaaagtaattgccttgttgatttgcaagcaaattttggtaaagttcttaaatatttgagtntagatcttctttgagagtg

SEQ ID NO: 2168 - DNA, 389 bp, Gossypium hirsutum
  Clone ID: LIB3493-032-P1-M1-H7
cgaccgtgggaaagcctgatacatctttagatgaggggaattgctaactgggatttctaatccatttgctgtaaataatcacatccttgtgcgtctatggccagaatatatggtgctttatctcaagatattgtctgtctgtgttgctcacttcatttagacatcatctggaagaatttggaaaaaaatggatgaattactctactgaattaagtggacaagttatggttaatcagccttggagggtatgaacaggatgaaatggatcaccttataaaacttactgatatcgagaagcatatgtatatgggagctgcacctgacccttatattataatacgtacttctggtgagacaacgttggacaaattttttttatggcagaatgc

SEQ ID NO: 2169 - DNA, 296 bp, Gossypium hirsutum
  unsure (1)..(296): unsure at all n locations; Clone ID: LIB3493-032-P1-M1-H8
gtgtttccatctcttcaattacaaacccccaaaaggagaaaagggaaagatggagaggtggaggatcactanttatatantanaatgtatccatagaatttgttaaatattattgttcttgattcttagtggtcgtggacaagattaaaagaatcgtgtatctacacctttataaaagccgtcaaatcatgtaagagtcgtttctcttagctaccatcaaatatcaattctaaaaaaaaaaatccaaaaaaaagattgttttactgaataaaaaaaaaaatgccctactaggagac

SEQ ID NO: 2170 - DNA, 511 bp, Gossypium hirsutum
  unsure (1)..(511): unsure at all n locations; Clone ID: LIB3493-032-P1-M1-H9
cttctctagaggtctggtctactcaacactttctgctccctgtgtagcaaccaaagactcagatccgctcggatttctttgtcccagaactagaatggagacctttctattcacatcagagtctgtaaacgagggacaccccgacaagctttgcgaccaggtctctgatgctgtgctcgatgcctgcctagcccaggaccctgacagcaaggttgcctgtgaaacatgcaccaagactaacatggtcatggtctttggagagattaccaccaaagccaacgtagactatgagaagattgttcgtgatacatgccgctccattggatttgtttctgatgatgttggtcttgatgctgacaattgcaaggtcttggttaacattgagcagcagagccctgatattgcccaaggtgtccacggacactttacaaagcgtccgggngaagattggagccggtgaccaaggtcatatttttggttatgccactggattaaaccccctgaatttcat

SEQ ID NO: 2171 - DNA, 389 bp, Gossypium hirsutum
  Clone ID: LIB3493-001-P1-M1-A1
gaaattccggttatcaacaggataaacgatttcgaagctagcataagcactctaaacaacccatcttttctttcccaagtttatgccctttctgggattgataaaatctaccaagcttatcatttttggaaatggggagctttgattcttgccctactggcctccttatctaccataatcaatagactcaagattctggttatcagattccgacgaaaccattctttaccatctcgacctcttctttatgacacatattttgatactgactcggagacttcatcatgttcatcatcggacaacgaagtagaacatgaggagccctcggcttctcaaaactggcgacaagttgatgaggattttcgagtgagaggatcgggcattttatt

SEQ ID NO: 2172 - DNA, 406 bp, Gossypium hirsutum
  Clone ID: LIB3493-001-P1-M1-A10
cccacgcgtccggtggaaacaggttcctgtgtagatactgaaagcaatgagttaataccacaaaaagaatgtatcgagggtacatatcagccaaaaacacttggaagcagttttgatgtcgttaaaattgagccggaaagaaggcatatcccatcagcttcatcagcactggttattggtggcatccttggtctccttcaagccttattcctgatttctggagcaaaacctctattgaacttcatgggaatcagttcagattcacccatgctaaaccctgcacaacagtacttgactttaaggtcactaggtgctcctgccgttcttctctccttagccatgcaaggtgtctttcgaggatttaaagacacaaaaactcctttatatgccactgtggcaggagatg

SEQ ID NO: 2173 - DNA, 409 bp, Gossypium hirsutum
  Clone ID: LIB3493-001-P1-M1-A11
ccaactcaagcctttcaaccgtcaactcgactctgctaatctccattaaagaacaatgtccatgcctcatacagtcgtcgaccctcctcccctacactactccaccacccttcctccgccaccggtttccaaaaagcagccttccaaattctctcgctccatcctcaaactcttcaaattcgtattcaagttcagacaaagttcgagtcattcggttttgtggttgaaacaaagatcgctcggggactacttcgtagtttacgacaagacgggtgcactcacgaccatccccgaggtcccggagatcgattttggaggactttcgccggagattaactcgatggtagtcgagagaagtgaatcggaaagattcactgcagcgtccactgtcggtatttcatgtgcttaa

SEQ ID NO: 2174 - DNA, 409 bp, Gossypium hirsutum
  unsure (1)..(409): unsure at all n locations; Clone ID: LIB3493-001-P1-M1-A12
ggaagaaatagaggtaccaaaaccaatattgatgccaatttcaggaaaggagcaaaagtgtgttgggaatatatttagttgcagttttaatgcaagagagaagaaactgatatgtgtgaccagtggcaactcttacttgggttctttcattgtcaaagagctattggctcatggttaccttgttcgagtaaccattcaacacctagctgaatttgaagatgtgaaagacctgctaggggtggaagatttaaacctattggaaagtgtagttgtaaccaagatggaagatttacaaagcctttgtgatgcttttagaggttgccatgctgtttttcatacatcttccttcattgatccacatggtatctctggntattcaaaacaaaaggtgtttttggagactgaagtg

SEQ ID NO: 2175 - DNA, 395 bp, Gossypium hirsutum
  Clone ID: LIB3493-001-P1-M1-A2
gagatcttttgttttgagtgacttagggatttcaacgcttttcatttctcagctcaatttatcctgtttactcgatggaacggaagcttgtggttttgggaatcccttgggaggtggatactgaaggtttgagggaatacatgagtaaatatggtgatttagaggattgtattgtcatgaaggagcgaactacgggccgatcccgtggttttggttatgtaacgtttgcatcggctgatgatgcgaagaatgtgctatcaattgagcattttcttggtgagagaatgtttggagttaaaatagctactccaaaggaggagatgagagcacccgtaaagaaagttaccaggatatttgtggccaggattccaccatcagtggatgaatcaaccttt

SEQ ID NO: 2176 - DNA, 398 bp, Gossypium hirsutum
  Clone ID: LIB3493-001-P1-M1-A3
cggacgcgtgggttgcgattccctggtcagctcaactccgatctcaggaaacttgccgtgaatctcatcccctttcctcgtcttcactttttcatggtgggttttgctccactcacttctagggggtctcaacagtaccgagctctaacagtacctgagctcacccagcaaatgtgggacgcaaagaacatgatgtgtgctgctgatcctcgtcacggtcgatacttgactgcatctgctatgttccgtggtaaaatgagcaccaaggaagtggatgagcagatgttgaatgtccagaacaagaactcctcatactttgttgagtggatcccgaacaatgtgaaatcgaccgtttgtgacatcccacccactgggctgaagatggcatcaacatttat

SEQ ID NO: 2177 - DNA, 393 bp, Gossypium hirsutum
  Clone ID: LIB3493-001-P1-M1-A4
gtacttctcacttctttctttatatatctttgtctctctctacctctgtctgaattctaaagtctctcctttttcctcccctgtaaaaaagcttaaacaaaaaaatggagaacaataacaaccaggtcacgggagagttgaagtctgggaataagaagcaggttcgattgttttactgtatggagtgtgaagagcttgcccgtaaagttgctgctcactcccaactcattacccttcaatctatcaactggaggagctttgatgatggatttccaaatcttttcataaacaatgcacatgatatccgaggtcagcatgttgcttttctcgcatccttcagctccccagctgttatctttgaacagctttccgtcatatataatcttccgcgat

SEQ ID NO: 2178 - DNA, 411 bp, Gossypium hirsutum
  Clone ID: LIB3493-001-P1-M1-A6
cccacgcgtccggcgggagcttaagcgatatccaaacgcagagattgtttggtgccaggaagaaccgatgaacatgggtgcatacaactacattgcacctcgtcttgccactgcaatgactgctttgggcagaggaacctttgatgatatcagatacattggccgtgctccatctgcttccactgctactggcttctattctgtgcatgtgaaggaacaaaccgagcttgtgcaaaaggccattcaacctgaaccgatcaagaccaatactactatctgaagcttttcgcaagatcattcttgaaaactacagtattaaagcaatgctctaaaataacatctggtgcagagcttgagaactcttagggtttgttatttcgatgatcgtcatgtttctgctattccttctct

SEQ ID NO: 2179 - DNA, 366 bp, Gossypium hirsutum
  Clone ID: LIB3493-001-P1-M1-A7
ctagcctctctttcttcttctgcttcatcttcttctctgttctataatggaagcaaagatctgaataggagtggcggtgttttttcttttttggtggaacaaatggctttcaatcatcaacactcttcatttgttctcgatgctctttattgttcagaagaaaactgggaggaggatgaagatgagcgttgcttcaataatgggattaatgataatgataatgataatcaattaaacccttttccgatcttgttagaacaagatttgttctgggaagatgatgagctttcttctttatttacaaagggaagaacggaatcaactgtacgatagtcttcaaaccaatgggaatctagctgggggctc

SEQ ID NO: 2180 - DNA, 305 bp, Gossypium hirsutum
  Clone ID: LIB3493-001-P1-M1-A8
gatccttaaaaaatattggtagcctgttaagtgaaattttgtggattaaagattgccaagtggacatgcatggccaacatcaaaatcttggaagcttcaatgaaatgaaagatagagatattacgtagataaggaaccttactctcacctttctatataataaacgcatctgattgccccttcaatcactcacccatcacctacaaaatcaactgcttcacaatggcctatacaaccatggctatttttttcccatcattcggcggtaaggcaatgaagttcactttttggagacaaagtttgtg

SEQ ID NO: 2181 - DNA, 389 bp, Gossypium hirsutum
  Clone ID: LIB3493-001-P1-M1-A9
ccggttgcaaaaggtcacgatgccatcaagtataatattcctccttttactatgtttttgttattcagttttgtgtgtaacatggtattaagaaccatagatttaaacattcacttttagaggcaattttgcttggaatattaatggggtaaataatgaaaatggtattttaattttctaaatctttggtttgaaaaaaacaaatcaagtcttatgagttcgagttctcgatgctaattggatacgatgcagatatcaaatgaatatctgcttatgaccctccaccggcacgtctatttggtttgcgagtacttgaattgaaagagctgggagtcaccgaggaggaagcagtggccgttgctgatggcaacatatcgagtactcctggc

SEQ ID NO: 2182 - DNA, 397 bp, Gossypium hirsutum
  Clone ID: LIB3493-001-P1-M1-B1
aagaaatttagtgtcgtcttggttacgatggcggtgctcctgacagccaccatgcctccaatggcaaccgccgctcgcaaagaggcggtgactctccccgctgactcaagctcaacagccactttggttaacattttccacgttaaaggaaatcctgatgccgaatgcgtcccgaagtatgagttttgcttatttgcagaaaaggaatgctgtggtaatggcacatcctccgaagggggcttcccgccgtatttccttaattgaaggaggggggctaaataaggacctttatggggtttaatggctggttaataaattaattacttggttcaataaacgtaaatgttaaatgccttttgtctttttagaatactctaaacttattttactggcattt

SEQ ID NO: 2183 - DNA, 405 bp, Gossypium hirsutum
  unsure (1)..(405): unsure at all n locations; Clone ID: LIB3493-001-P1-M1-B10
aaattctggtagtggtttgattgaatactcttcaagtagtagtaggtcggctagaagtaggacagagaaggagccaattggtaggagcaaaccacataatagggtggccatctttcgggatcgcgagactgaccgcaaggaccctgattatgacaggaactatgataggtacatgcaaagatttgatcctgggtttgggttcaataatggtccatacacaatgcaacctatgtacacccctgcaattaactacaacaccgaatttccacaacttggatccactcatcggcctcaaatagctactgaacaccaacctcggcctctcccacaacatatacctgggccctgggtggctccaccaactgctacangaatcagttatggtcatcctgaaacaatgatgcc

SEQ ID NO: 2184 - DNA, 402 bp, Gossypium hirsutum
  Clone ID: LIB3493-001-P1-M1-B11
gagagagatgatattggtgagattggctacctaaatgggctctttgtgctagcacgatccattggttcgattgggaacacttgtccatcagaatagactgaagcatgcactataccgtaacccatgggaagatcttgtctacactaattgagagaacattactagcagcacgtgcactctacttgagcattgacgttacaagagtccttgctcgcgtctgaatttttatgggtgattgagggatgggtaacatgtgaaggacacttatgagagggttgaaggaaaaacgctctcccctggaaatttgagagctacatttcataaccccgaatatgacaagttgatcaactattatgtaagagagaaatacgcaccgaggtacactggtggaatggaacctga

SEQ ID NO: 2185 - DNA, 411 bp, Gossypium hirsutum
  unsure (1)..(411): unsure at all n locations; Clone ID: LIB3493-001-P1-M1-B12
gctagctctcttcaaggtgtcttaatcagcattgagaatgctcctttccttttagagcaaggatttgccgtaaccaatgcagtgctcgatgctttgagcaaagctggctacggtaacaagacagatcagaaagtcatgattcagtcaagtagtagctcggttctaatgaagttcaagagtcaaaccaactatgatctcgtttacaaggttgacgaanatattggtggtgctcaaagttcaacgattgatgacattaagagttttgctagcgctgtcgtcattagcaaggattctgtatttcctgaaaattctgcattcatcactagtgctacgaatgttgtaccgaggctaaagctgctaatctctctgtatatgttcaaaccttcagtaatgagttcacatctcaagcat

SEQ ID NO: 2186 - DNA, 402 bp, Gossypium hirsutum
  Clone ID: LIB3493-001-P1-M1-B2
cggacgcgtgggaaaaaaaatggcagcgaagcaaacgacgatcctagttgccgccatcctcgtaacggctttttacggcggcgcggcgacatcggcgcaggcaccggcagctgatccagcgatggccatgtcgccgtccgccatggcaccgacgccggactgtatgacgaacttgctcaacttatcggattgtttgacgtacgtggaggccggaagcaacttgacgaagccggacaagccttgctgtccggaattggctgggctagtggaaagtagccctcaatgcttgtgctatttgatggataagaatgcgacggcgaactatgggatcaacattgacatggaaagagctcttaagctgcctaatgtttgccatgtcaaaacccctccctgtagtctttg

SEQ ID NO: 2187 - DNA, 399 bp, Gossypium hirsutum
  Clone ID: LIB3493-001-P1-M1-B3
gcgtttgtgggtttatttgaagtttttttgcctctcgtttgctttctgcttctctactgcttaagagataagtatcatgggcctccaaagagtttcccgcttgttgggatgatgccacagtttctcttcaacattcctcggctgcatgactggtttaccaacacactcgagatatgtcactgcacttttcttttcaaaggggtttgctaagacgaacgtactggttacctgcgatccttccaacattcactacattatgagttccaactttaacaacttccccaaaggacctggattcaaacagatttttgacatcttgggagacgggattttcaatgtggatatggatttgtggagaaaacaaaggatagctgcttcagggttcatgaggcatcagct

SEQ ID NO: 2188 - DNA, 402 bp, Gossypium hirsutum
  Clone ID: LIB3493-001-P1-M1-B5
cttttgacatcttttctctttttctttttattttgtctcaggtagttctcaatcttcctattcaaaggtacaatttttttctcctaaagatacgtttaagttttagtacgtgcagattagaatggatcaccaagggcatggacagcccccggcaatggggatcataggtggtggagctcaaatgccgtatggcactaacctgtatccaaaccaagtgactggggccccaaattcaggatcggttggaggcattcaaccgagcagccagccaacaggagctcaacttgcacaacaccaacttgcttatcagcaaattcatcagcagcagcaacagcaacttcagcaacaacttcagacattttgggcaaatcagtatcaagaagtcgagaaagtttcggattt

SEQ ID NO: 2189 - DNA, 409 bp, Gossypium hirsutum
  Clone ID: LIB3493-001-P1-M1-B6
ctgctttagagttctggtctgctcaacactcttccttctctctaaatctaatactcagatccgcgagtaatttttgtcacagctcgttagaatggagacctttctattcacatctgaatcagtgaacgagggtcacccggacaagctctgcgaccagatctctgatgctgtgctggacgcttgccttgcccaggaccccgacagcaaggttgcctgtgaaacatgcaccaagaccaacatggtcatggtctttggagagattaccaccaaagccaatgtagactatgagaagattgtccgtgacacatgccgctctatcggatttgtttctgatgatgtgggtcttgatgctgacaactgcaaggtcctggtcaatattgagcaacagagccctgatattgccccaggt

SEQ ID NO: 2190 - DNA, 397 bp, Gossypium hirsutum
  Clone ID: LIB3493-001-P1-M1-B7
cggacgcgtgggttaaaatactgcagaatctttgcggagggccgaatattgtgaagttgctggatatagttagggatcagcagtcgaagactccaagtcttatatttgaatatgtgaataatacggattttaaagtgctttatccgacgctgtctgattatgatattcgatattatatctatgaacttctgaaggcattggactattgtcactcacaaggtattatgcaccgagatgtgaagccccataatgtgatgattgatcatgagcagaggaaacttcgtcttattgattggggccttgcagagttttatcatcccgggacagaatacaatgttcgtgttgcttccagatattttaaaggtcctgagcttcttgtcgatttgcaagactatga

SEQ ID NO: 2191 - DNA, 396 bp, Gossypium hirsutum
  Clone ID: LIB3493-001-P1-M1-B8
gatcaaattggatatcttgacataacatttgggtgctttttggggtggctaagagtgacagagaagatgagtgggatcaagctgcttaatgaaatcaacactcctgctctgcttaaatgggctaacagattctgcaatgatgccgccgtgaaagatgtcatgcctgagaccgaaaagcttgcggagtttgctaagatgcttaggggcagagtgagagccactcccacatcttgaattgccaaagggagccatatttcttggctcttgaccatattttacatgcaattgtctcctttccggtttttctaaataaaagtatggcatttttaccccagtaatacaaaataataataacaataactcaagtgatatgcccatgagattagttatcaaaat

SEQ ID NO: 2192 - DNA, 400 bp, Gossypium hirsutum
  unsure (1)..(400): unsure at all n locations; Clone ID: LIB3493-001-P1-M1-B9
ccttccacaaatgtaatctcatctcttctcttctctttatttagcattttacaacgaacaaaataacagtttcattttcgaaaagaatggaggttggaatgtcactaaatgcacttgtgaggcttcctttatcgagtacttcaagagcccatcacgaacctgtcgacgggttggtgaaacactcgctattcagctccagaacaacgccgntgcggttgccgcagcagacccggagacagcaacatggaggagggatgttggtggttgaagctaaagggaagaaaggaatggcggctcgtcaattccaaaggcctncacctcctcctttgcctaagattgaagacgatggcaaccctcggtttgttatctncatacgcatggcaaatgttaatctttggta

SEQ ID NO: 2193 - DNA, 404 bp, Gossypium hirsutum
  Clone ID: LIB3493-001-P1-M1-C1
gaacattttggctcccagtgctgctgacaaaagtaaggcgtggaaaagctgcaagcttgacttgaagaagtgtacagcagcgcagctcaaaaccatccaagatttcaggacgcaattcttaagtgccctgaacagagccggggtggtcaactctccatctaaaggaatgttcatagattcgtgctatgcccactgtcaagtaggaaagcagatacaatggtcaagcgatagttctccggtagtaagcaacatgaaaattgccaaggctgttggagactggtattatgagcggagccccatcaaaaagcttgactgcccttatccttgcaaccctacctgcccaaaagttgactctgattcataaatcctatacatataattatggactacagtttatttattag

SEQ ID NO: 2194 - DNA, 330 bp, Gossypium hirsutum
  Clone ID: LIB3493-001-P1-M1-C10
cggacgcgtggggtgaaattatacacatatcagatattcagggggcttgcatacctccatagtgttgttggagtttgccatagggatctgaagcctcaaaatcttttggttgatcctctgactcaccaggcttagatttgtgattttggaagcgcaaaagtgcttgtcaaaggggaagcttacatttcatacatttggtcgcgtttttattgggccccaaaacttatttttggtgccactggatacacaaccttcattgatatctgggcagctggttggggtcttggtgaacctttgcttggccaagcattggtttctggggaggatgct

SEQ ID NO: 2195 - DNA, 409 bp, Gossypium hirsutum
  Clone ID: LIB3493-001-P1-M1-C11
ggaaaactttacaatcgaaaatccaaaggctttatagccgaaatccccaaaaaaacaaatcaaaataaacataaaataaaacacaaattttttgttcgtatttgctgctgcgttcgtccttttgcaggtacggcgcgtgctggcatgcgttggctcttggcgtggggcgtacggaggcacgggcgtggtcgctggagggtacggaggctggggctgctgcggcgcaagcagaaactgctagggttctgcctgatttttttgtttttgggctgtgggatatttgggtctaggtttgggcttgtaataagtttgggctagggtattagtttgggtattggggttagggatgggtcaaagtctgtaaaaggacatttaatggactgttataatatttattgggtttttatta

SEQ ID NO: 2196 - DNA, 409 bp, Gossypium hirsutum
  unsure (1)..(409): unsure at all n locations; Clone ID: LIB3493-001-P1-M1-C12
cccaaccgttagcgaggagtaccaaaacgccgttcaaaaggctaagaggaagctaagaggtctcatcgctgagaagaactgtgctccactcatgctccgtctagcgtggcactcagctggaacttttgatgtcaagaccaagaccggaggtccattcggaaccatgaagcaacctgctgagctcgctcatgctgctaacaacggtctcgatattgcagtcaggcttctcgagccgatcaaggagcagttccctatcctttcatacgctgacttctatcagcttgctggtgttgttgctgttgagatcaccggtgggcctgaagttccattccatcctggaagagaggacaagcctcacccaccacctgagggtcgncttcccaatgctactgagggagctgatcacttg

SEQ ID NO: 2197 - DNA, 399 bp, Gossypium hirsutum
  unsure (1)..(399): unsure at all n locations; Clone ID: LIB3493-001-P1-M1-C2
ggaaagccaaaactccaaactttctattttgcttttttattatatttttttttggttcaatncaggnncgccatttcctttgcatgtagatgctctttggttagtccctatcgccgctacttggactcactttccgctgctatctttttttccggctttctcatggctaataacaccaacgaggcccccgccgccgatgatttcctctagcaaatcctcgggctccctaactttgcgccctccgaaacgggcttagctggatccgacgctcgattggctgcaaccgctgctggagctggagctccaatgtttttgcagctcagctccggtgatggcgccgctcatatcggtggaatcggcggcggnggaagctgtgcgtttcatgggcaggttttcccc

SEQ ID NO: 2198 - DNA, 392 bp, Gossypium hirsutum
  Clone ID: LIB3493-001-P1-M1-C3
agtctccaacttccatttctcttatcggggttgatatcataaataccaaaatggcatgttctgaagaaacatcagcccagttagaacttatcaggcaacatctctttactgattttgcttccatggaaactccaccacccttctatcaactctcaaattccgagtcatctcatgtttatagcccgacccggttaaaacaatcgagtctcagccaacgtcgtccttctattaacgttatgatcccacccacaagttttaacataggcccaaacccggttccagattcggctgcggtggcggttgaatcatacgagaaaagtcattatagaggtgtcagaagacgaccatggggggagtttgcggctgaaattagagaccctaacaagaaaggg

SEQ ID NO: 2199 - DNA, 413 bp, Gossypium hirsutum
  Clone ID: LIB3493-001-P1-M1-C4
ctttcataacaatgactaccttgaaatttgccgttgctataaggcaatatacgagattccatccataagagaagatccatctcagtggattctggtcttaagaaaaatctgttggtacttgatcttggccccacatgatccaatgcagtcaagccttcttaattgcacattggaggataagaatctttctgagatcccaaaatttaagttgctgttgaaacagttagttacaatggaggttatccagtggacatccctgtggaatttatacaaggatgaatttgagaatgagaagaacatgcttggaggctctttgggtgacaaagctgcagaagatttgagaatgagaattattgaacataatatccttgttgtttcaaagtactactcgaggattacattgaagagacttg

SEQ ID NO: 2200 - DNA, 407 bp, Gossypium hirsutum
  Clone ID: LIB3493-001-P1-M1-C5
tctggagagaagatattctgaagcctatgacttgctatcttatgcgaggaaacatttgttacatttcaagaatttcttctcaaatcgtgttttaagtggtttggtgttggatggcattattactagcatcaatgaccattgaaagttttcactattagaagtggtaaacagcatcaaacggtattatttttcacatgatgctaatcataacatagatagccatgagctacaaagtggttggaggagattgtgacaacagttatcctacagctgtttactggcctgtagtggaagctggcttcctgtgtgtaaattaatcgaactgcagttcttcagttgatttgctgaatgcatgctaggaatcttcatttgttgctgctttgcttgatatgattttttctggggac

SEQ ID NO: 2201 - DNA, 412 bp, Gossypium hirsutum
  Clone ID: LIB3493-001-P1-M1-C6
aaaggtggcctctttgtagcattgagtaaaatgaatctcaacaacctcaaagttcctaagatgcctggaggcggagcacttcctgctttgcttaagattggagtcattggtgggcttggcctctatggagttgccaatagtctctacaatgttgacggagggcaccgagcaattgttttcaatcggattttgggcatcaaagataaggtttattcagaggggacgcaccttatgataccatggtttgagaggcctatcatctatgatgttcgtgcaagacctcatttagttgagagtacttccggtagtcgtgatctccagatggtcaagattgggcttcgtgttctcactcgccccaagtcaactcagttaactgaaatttatcgaacccttggtgagaactataatgaga

SEQ ID NO: 2202 - DNA, 398 bp, Gossypium hirsutum
  unsure (1)..(398): unsure at all n locations; Clone ID: LIB3493-001-P1-M1-C7
cccacgcgtccgctcagaaattaaaagaaaaaatatcaattttattttattactaaagcgtgaagattcaagcttgcaatcgaattcctcatttgaaattctttgatgaaacaggtattagaactgtaatagagaggataaaaaaagatcattgttgaggatggcttgtaaaggatgcctagaatgcttgttgaagctgttgaacttcttgatgactcttgttggtttggcaatggttggatatgggatctacttgtttgttgagtacaaaagagctgctgatgttgccatgcttttgtcacctgtgggcactgaccaaatacagctcggtcggcccatgctcatggccgtgtctctttcgtctagnattttcgataatcttccaaaagcatggttta

SEQ ID NO: 2203 - DNA, 400 bp, Gossypium hirsutum
  Clone ID: LIB3493-001-P1-M1-C8
gaaaatgttgacatctattcaaaatagcagtgcaagcttggatgcaaacttcgggatgggacatgtgatggggctaggattcccaggccaccaaattgttcccagcaacttggcagcaccaggcaatggttacgccgcagcataccccattttcacgcagagtaaaaatatgatgggggaatcttctaatgttgctgaaaatgggaatggcaccaattgcctgttagagcccgtcgtgatacaaaacaagaagaggatcatagatggtccgccggaggtggtagtcgaaaggagacaacgccgcatgattaagaatcgagagtcagcaacaagatctcgagcaaggaaacaggcgtacacagtggaactggaattagagttgaaccagcagaaacaggag

SEQ ID NO: 2204 - DNA, 401 bp, Gossypium hirsutum
  unsure (1)..(401): unsure at all n locations; Clone ID: LIB3493-001-P1-M1-C9
ataaaacccatcatttctatcattagcaagaaaaaaaaaaaaaaaccagacccattttttatttttaatttttttctgcttgaaatttctctctctgataaccccaaatcctcaagtgtcttgtagagagagagaaaaaacagaaacacaaaaacaaaaaagaaaggggaaaaaaattctaaattcagtatccattttaatcgacaatttaaaaggatgggtcaagcttttcgcaagctcttcgatacctttttcggtaactcagagatgagggttgtgatgcttggccttgatgcagctggaaaaacaactatatngtacaagttgcacattggagaagttttatcaactgtccccactattggatncaatgtggagaaagttcaatataagaatgtgat

SEQ ID NO: 2205 - DNA, 397 bp, Gossypium hirsutum
  unsure (1)..(397): unsure at all n locations; Clone ID: LIB3493-001-P1-M1-D1
cggatcataatgctgcaccaaccaagcaaggttatggatatggaacacgagcttcgtgcattaaggattcaactcgcagagaagtctaagcgttccctgttgcttcaaaaagagctagcaagaagcaagggagtcaaggataatttatctaatttatttgaattggatggcgctgaaactttaggttcatatttgaagatcaaaccttgctctgatattgctcccgaactttcgaaatgttcaattcagtggtatcgtgtttcatctgaaggtggcaaaaaagagcttatatcangtgcttgcaaatctgtttatgctccagagccttttgacgttggtcgaagcctgcaggctgagattatttatgatggccagctgatcaaattgactactactg

SEQ ID NO: 2206 - DNA, 406 bp, Gossypium hirsutum
  unsure (1)..(406): unsure at all n locations; Clone ID: LIB3493-001-P1-M1-D10
cggacgcgtgggctggcaacaccctctccttcctcttcttcttctcatctcagattttccataaaccctaaatctaaattcccgtttctatgaccaacaattctccaatccccatgctttaacacaaaattccttgtgagaacccctccccaaaatgatgattcctttaattggttccacatgtattcaccttgttttcatcttcgcggctgtcaactgcgagaaagattctatttacgatatcctaaaggcccatgggctgcccatggggttgcttccgaagggtatatcccgatttgacatcgacgatacgggccgctncgaggttcatttggatcaggcctgtaatgccaagtttgaaagccagttgcattttgataccaatgtgtcgggtaccttgagttat

SEQ ID NO: 2207 - DNA, 360 bp, Gossypium hirsutum
  Clone ID: LIB3493-001-P1-M1-D11
tttggttttgcgccttagaggaggaatgcagatattcgtgaagaccttgactgggaaaaccatcaccctggaggtggagagctcggacacgattgacaatgtgaaatctaagattcaggacaaggaggggattcctccggaccagcagaggttgatctttgctggaaagcagttggaggatggtcgaactttagcagactacaatattcagaaggaatccactctgcatcttgtccttcgcctccgtggtggtttctaattgggtgtcttgtgcttgttttcataattttcatttctatggaactggtggtgttttaagtggcgaaggccattagtagtttgtagggttgaatgaacaca

SEQ ID NO: 2208 - DNA, 413 bp, Gossypium hirsutum
  Clone ID: LIB3493-001-P1-M1-D12
gatgcattgtttctgttgtgtcatccggatttgaatgcctaagtgctatcgggtcaacaacatctccattccagatcgttattttggagcttcaaatgcccgagttggatggatttgaagttgcaacaagaatctgtaagttccgaagccgtagctggccattgattattgccatgactgctagtatcgatcaagatatttgggaaagatgtttacagatcggaatgaatggggttatccaaaaaccagtgctattacatgaaatcgccgtcgagcttcgtaaagtcctggttcaggccaacagagtcttatgacaatacacgctctcaacactcacattcaaaccggtatataaagtccgttccttaacctatatctctcgcttaatgtttctcgagttcttgaacggaatt

SEQ ID NO: 2209 - DNA, 402 bp, Gossypium hirsutum
  Clone ID: LIB3493-001-P1-M1-D2
gcagtactcgttccattccaactcagtgctcactcaatccgactcaccaatggacgcgcaagacggaaatcagcaatcacagcaactcatccttggtcacaacgtcttcctcctcaagcatccagatgtccctgacatcgagaaggtccgtctcaaggatgaagtcctcatctcggtcaaatccaatgaaatggctccgtattatgaaaccctagctgccgataaagtggtggagctggatcaggacgttttggactcgatgcgtgccaagaatgaggaggagattaagaagctcgacgagaagattgctgatgctgaagaaaacttggggtgaagtgaagttcgagaagcacatttagctaaatccttatattacattcggataggtgataaggagaaagc

SEQ ID NO: 2210 - DNA, 423 bp, Gossypium hirsutum
  unsure (1)..(423): unsure at all n locations; Clone ID: LIB3493-001-P1-M1-D4
tggagttgntgcaaaaaaagaagccacgacttctctttattcctagaaattcctgggtgtaagacaggtaagcacacaaccgagaagccagtgttgaataagccagtagctactaagacgattccaacttctagtcctgctgttactctttccaccagtgcaacactcaaaagaatcctgccctaggtgcgttaaggggttctctcgctctgatcattgtncacaaggctatattgaccgcaccctacgcccagctgtactaggctattcataacgctgacattctatcagacttgctggtgttgttcgctgttgagatcaccggtgggcctgaagtnccattccatcctggaagagaggacaagcctcacccaccacctgagggtcgtcttnccaatgctactgagggagctgatcacttgt

SEQ ID NO: 2211 - DNA, 412 bp, Gossypium hirsutum
  Clone ID: LIB3493-001-P1-M1-D5
cggacgcgtgggttctggaagaaatttactttcgtcttggctatgatggcggtagtcctggcagccaccatgcctccaacggcaagcgccgctcgcaaagaggaggtgactctccctgccgacttgagctcaacaaccactttggccaaaattttagatgttaaacctgataagaaatgcctcaaaaattttgaattttgcatgtttacggccagagtttgctgtgaaaattgtgcatgtttaggattatgcctgtgtttgtaaactcttccccttttcccttatcatataactgcttgtattgtactaaaaaacatggttatccaaaagaaataaactgcaccaaaattcatgctacacatcataagtgtagattgggggcacgcaatgtatatacccttaaatagtaaac

SEQ ID NO: 2212 - DNA, 413 bp, Gossypium hirsutum
  unsure (1)..(413): unsure at all n locations; Clone ID: LIB3493-001-P1-M1-D6
tgacttcaaagctttggtctctctatatataaacattcactttcttccacgatcaaaatatcagtcacaccaaaccaaagagggggatcgaaacggggtggaaaggaattctgggttttgattatggaatagttttagcacctatgggccatgatattgctggacctgagctcgtagctgctgttgcaaacgctggtggccttgcccttcttcatgctcctgattgggattcaccagagcagctaaaggagctgataaggaagacacgagagctaactgataaaccctttgggggttgtgttcttttgccattccctcacaaggagaacataaaggctatattggaagaaaaggtggctgttctgcaagtagcgtggggngaatgctcaaaggaccttgttttagaagctcat

SEQ ID NO: 2213 - DNA, 401 bp, Gossypium hirsutum
  unsure (1)..(401): unsure at all n locations; Clone ID: LIB3493-001-P1-M1-D7
gttgaaaagacagaaaaggaagcagtctaacagggaatctgccaggagatcaagattacgaaagcaggcggagtgtgaagagctacaagcaagggtggaaaacttggcgaacgaaaactgcacccttagaggggaactacagaagctttctgatgaatgtgagaagctttcatcagaaaatagttcaattaaggaggaattgatgcggatttgtggaccggatgctcttactaagcttgaacaagagaacccctcttcagttgtcgagggtaatagttagtaggaaatctacagagataacttggtgccggcagtgcagtattccgtctagtaatattctttttttagcgttggccaataacctaatangacatttgttttcttactaatctaaaccctta

SEQ ID NO: 2214 - DNA, 397 bp, Gossypium hirsutum
  Clone ID: LIB3493-001-P1-M1-D8
cttaaagatcaggatgtgataagaactgtgctgaacatactgcagacaaatactagtgtggccagttctcttggaacatatttcttatctcagatttctttaatattcctggacatgctcaatgtgtacagaatgtacagtgagcttatatcaagcagtattgcagaaggtgtaccctttgcttcaaaaacatcctatgtgaaacttctacgatctgttaagagggagactcttaagctcattgagacatttttagacaaggcagaagatcaaccacaaattgggaaacaatttgtgcccccaatgatggatccagttcttggtgattatgctaggaatatgccagatgctagagagtctgagttttatcactttttgctacaataataaacaagta

SEQ ID NO: 2215 - DNA, 211 bp, Gossypium hirsutum
  unsure (1)..(211): unsure at all n locations; Clone ID: LIB3493-001-P1-M1-D9
tcggnaggacctgctgaaggtggattcagtgttgctttcgatccgctcgatggttccagcactgnccatacaaacatcaccgtgagtaccatctgcgctgtntgtcctggcgaatagtataacccggtatcgggactagaccaagtggctgcctcaatgacaattgtgggctctaacacaacatatgttcttgcacttaaggacatacttg

SEQ ID NO: 2216 - DNA, 414 bp, Gossypium hirsutum
  unsure (1)..(414): unsure at all n locations; Clone ID: LIB3493-001-P1-M1-E1
ccatgcggacgaaaccacctgcaataatcctacacatagggcgcatctaaccaaaaaaggcccggaatacgatagccgcagccaacaaggagagccccttcggcactttaactccggacgaattctatgcccgccactcagtgagtcactcttccgagttcatcactaacgctcgcggtctcaaactcttcacccagncttggaccccactagatactccgatcaccggaatcgtagccgttgtccacggattcaccggcgagtcgagctggttccttcaacttacctacggtcttttcgccaaatcgggattcgccacgtgtgcgatcgatcaccagggccacggattctccgaaagccttgacggactagatactcacataccaaacatcgacggcgttgtcgacgattgca

SEQ ID NO: 2217 - DNA, 390 bp, Gossypium hirsutum
  unsure (1)..(390): unsure at all n locations; Clone ID: LIB3493-001-P1-M1-E10
attgggctgggaagaattggcatggcaattgctaagagagctgaagcatttagctgccctattagttactactctagaactgagaaaccagaaatcaaatacaaatactatccgagcgttgttgagctggctgccaactgcgatatcttggttgttgcttgtgcactgactacagagacccaccacatcatcaacagggaagtcatcgatgcattgggtccaaagggtgttcttatcaacatcgggagaggccctcatgttgatgaacccgagctggtttctgcattggttgaacaccgattaggaggtgcagggcttgatgtgtttgaacatgaacctgaagtaccggaagagctttttgggcttgataatgggngctcttacctcatg

SEQ ID NO: 2218 - DNA, 401 bp, Gossypium hirsutum
  Clone ID: LIB3493-001-P1-M1-E11
gaaaaacaagaagctcaggcttattggaccctcactgaacagaacaggcgaaaaattgctggttggaccataatgttattatgtgtaggggcatttggccttacctttgcagcttcaaatgtgtggattccgagtcttattcggttaacatgttgcggagttggtggtgttcttcttctgtctggtttgattgtgctcacctgtatagatcaagatgatgcaaggcataatttcggccataccggaggtttcatatgcccttttgttccacttctaccaattgtctgcattctcatcaatgtctacctgctcatcaatttgggggctgcaacatgggctagggtatcggtgtggcttttgatagggggtgttgaatattgttctatggtcgatcccacagc

SEQ ID NO: 2219 - DNA, 410 bp, Gossypium hirsutum
  unsure (1)..(410): unsure at all n locations; Clone ID: LIB3493-001-P1-M1-E12
ctttgaatactcccattttcttattgattttgcagatcggttctctaatccttttttcgggtgtagcgttgtttatacgtttggttgttgttgaagaagtgctactaccatggctacaaagaagagcgttggggacttgaaggaagctgatttgaagggaaagaaagtgtttgttagagtcgatctgaacgttccattggatgataacttcaacataactgatgacacaaggatccgtgccgctgttcccaccatcaagtatttgatgggtcatggctctaaagtcatcctctctagtcatttgggacgcccaaagggtgtcactcccaagtacagtttgaagcctcttgtgccaaggttatctgaactccttggagtcnaggttaaaatggcaaatgactgtattggtg

SEQ ID NO: 2220 - DNA, 341 bp, Gossypium hirsutum
  Clone ID: LIB3493-001-P1-M1-E2
ttttgaacttggatgatgatgatgatgatgatgatgatgatgaggataatcgcttgagagatgaaagtgaaatggcatatgattttgacagtccgggatctcccaaacaaagttcaatccttaaagtgtccaagttgctggactcgtaccttgctgaagttgcactagacacaaacttgtcgccatcaaaattcatagcattagcagaactacttccagaccatgctcgcatcgttagcgatgcactatacagatctgttgatatcttcctcaaagttcacccgaacataaaggattctgaacgctacagactatgcaaaacaatagactgtcagaaacta

SEQ ID NO: 2221 - DNA, 398 bp, Gossypium hirsutum
  Clone ID: LIB3493-001-P1-M1-E3
cccacgtgaaaccattacaacaccgcaaacctccaatcttttcagcgtcctatggcataagccaagccccattgccatggattggtactcttggttgtcaaaaactgcccttgagccctcacttatctatgactatggccttgccttctcccgtaatgagcttcaaaaagaggatttagcctacttcaatcatgagtttcttcagagcatgggcatatcagttgccaagcataggcttgagattctcaagcttgctaggaaggaagttggagaaacccctaatagcctgtccaagctcattttggcaatcaacaaaaccagaaagagctttaacaagtatgttaacaagttggttcaccatgagaataactcgattaagctgctgccggagcccggtc

SEQ ID NO: 2222 - DNA, 382 bp, Gossypium hirsutum
  unsure (1)..(382): unsure at all n locations; Clone ID: LIB3493-001-P1-M1-E4
tcggtatagatcnnnnctttcatatgcagatctgatgaatggggtttcttgtttttgtgtaaatttattcagatctagtgtttgatgnctttctgttctcaattgttatgcttnncttttctgtattgactctgtaaatttgggagactttattctaaggtgtgatcttcatatgcgcaggctggtgtagtggatggttttgattgtgttgagtgacgtattttttgacgtggtgatagagatattatgttaatctaggagataaaatgcttatatctgctaatatttgaaaatgggtacggagatatagncttatatattnaatttttaatggactttgctntagtgattgaattgtggttttaatggccatttgtgtata

SEQ ID NO: 2223 - DNA, 412 bp, Gossypium hirsutum
  Clone ID: LIB3493-001-P1-M1-E5
agaaacccttatcgatcaatgggctctaccgagcatttaattcaacagaggagcaatggaatgaatgaaaatagtatggagcaagcaggtggctatccactggattatttaggggttcctgatgccagtatgatggtgatgggtgatgaaatgggaaggatgagcatggcacatcagaatgctgttgctgctttgcatgatgatcaattggcaatggggaaaccgtatttgaggtcatggaaccaacaaagatagtgggtgagctgatgcgatatcatcttgctgaattgcaaacttcatgtgatgcttccttcttaaattatatatatttgggaagtagaagagagttgaggttactatttgctattacaactctgcatatttgcaggagcggagtatacaatacaaggac

SEQ ID NO: 2224 - DNA, 362 bp, Gossypium hirsutum
  unsure (1)..(362): unsure at all n locations; Clone ID: LIB3493-001-P1-M1-E6
aaagccaaatttcaaacgaaagtactagaactccatagaaagacgaccgnttacataaggatttttgccgagaaagcaaattccaaaaacggataccaaacactagatctaacctaatttcacaatcaatcaagtaaatacaaacaatctaagctctttcacctgtaatcctcctagcaagctggatatccttgggcatggaagnaaccctgttagcatgaattgcacacaggttagtgtcttcaaacaatccaacgagataagcctccgccgcttcttgaagtgcagcgactgtgctgctttggaaccttnaatcagtcttgaaatcttgagcgattttcctcaccgttttaggccaggaa

SEQ ID NO: 2225 - DNA, 234 bp, Gossypium hirsutum
  Clone ID: LIB3493-001-P1-M1-E7
ctaactctccaactgttgtttccacttcctctcttccagatctgaatcgcaaaagggaattttcagttgaaaaagatgggtcgcggagttagcagtggcggtgggcagagctcattaggttatttgtttggtagcggagaagctcctaaaccagggacaaacaactcccaagctgctcccgctgaaacaccagctgtctccaaacctgggcctgctcctgaaccagtagatatt

SEQ ID NO: 2226 - DNA, 347 bp, Gossypium hirsutum
  Clone ID: LIB3493-001-P1-M1-E8
ataatttataaggaagaggattttgtttcccgtgtcaatgagataacatgtggcaagggggtggaagttgtctacgattctgtagggaaagatacctttgagggctcgttggcatgtttaaagccccgtggctatatggtgaactttgggcagtcatccggtacaccagatccggttccgttgtctgcacttgcacccaaatcattgttcttgactaggcctttcatgatgcaatacacgtcaactcgggatgagctgctggaaactgcaagggaagtgtttgctaatgttgcatcaagcgtattgcgggttcgggggaatcacaagtaccccttgtcagaagcagc

SEQ ID NO: 2227 - DNA, 404 bp, Gossypium hirsutum
  unsure (1)..(404): unsure at all n locations; Clone ID: LIB3493-001-P1-M1-E9
aagcaatcgaatcaccattcccatttctccccgaaatcgaacgttgtttttactttcctaaaagaagatggggatcaaacgttccctcctcctcatctccatcttctccctcgtggctatctcagcttgtgctagacctccttcagacattactgatacgcccgagtcacccgattccacacccgaatcacctgattccacacccgaggcacctgatgatgactattcacctaatgcaccagatgaagcagcagacggttatgcacctccacctgaagcaccaaccccatctacaacctttacaatattgcccggcngtagttaccctgagctcgatcaaatttgtggagcaaccgactaccccatcnaatgcctaagattcatttctccgtacttgaacgaca

SEQ ID NO: 2228 - DNA, 375 bp, Gossypium hirsutum
  Clone ID: LIB3493-001-P1-M1-F1
gtttgaactagtctcagcagcccaaacgatcttgccagatagtgatggtgcaattgatggtcaccttcgtgaagttgggcttacatttcaccttcttaaggatgttccggggcttatttcgaagaatatagaaaagagcctggtagaagcatttcaaccattggggatatccgattggaactcccttttttggattgctcatcctggtggtccagcaatattagatcaggtagaagccaagttagcactgaagccagagaagctacgagccacaaggcacgttctttcagagtatggtaacatgtcaagtgcttgtgttctatttattttggatgagatgaggaagaaatcaaaggaagatgggcttcaaaccac

SEQ ID NO: 2229 - DNA, 414 bp, Gossypium hirsutum
  Clone ID: LIB3493-001-P1-M1-F10
attttggattcaccgtactttgaatcacggagttctgtttttgaggatcccagtgaacctaaagggcatgactatggccaaggggagactggtaaaggatctactagctctggcttccagaatatagcatcacctgttgcagctcactcctcgtctttggagattgagaaaggggattctgctgtcataacctcggaaaatatgtctagggaagctccgtctcccagttcaggaagcggagtttgtgaagcagtggattcaaaggggcctagaaattgggaccagataaaagtgccgggacttcacccttctatgtccatgagtgatcttatgaaccacattggacaccgtctttcagaacacatgacctccgaaaatccatcctctgaaaatagaccagactgccaggaaatg

SEQ ID NO: 2230 - DNA, 411 bp, Gossypium hirsutum
  Clone ID: LIB3493-001-P1-M1-F11
cttttgacaaagatgatgaaagagcatgaggaaacagcttatgaacgcaaggggaagccggattttcttgatataattatggagaacagagaaaactctgcaggggaaaggcttagtttgaccaatgtcaaggcgcttctattgaatctattcacagctggcaccgacacatcctctagcataatcgaatgggcattagctgaaatcctgaagaacccaaaaatactgaacaaagctcacgaggagatggataaggtgattggcagaaaccgaaggcttgaagaatccgacatacccaagcttccctatcttcaagccatttgcaaagagaccttccgaaagcatccatctactcccttgaacttgcctagagtgtccacccagccttgcgagatcaatggctactacatc

SEQ ID NO: 2231 - DNA, 413 bp, Gossypium hirsutum
  unsure (1)..(413): unsure at all n locations; Clone ID: LIB3493-001-P1-M1-F12
tcttctccctcatttgcttgcacggctgggcgtagtttaagcggagagggtgtgcaggattaaagggtcaccattgtttccaatatgatgcttaataataagnccntgttcttatcagctttgttttgcattgctgcagctggcagttttaggccaagctcctcctactcctagtaatagtgcggcatccacgcctgcgccgctcgtctacaccctgtttcacacctgtacttgactacttaaccacctgcaacacccacaactacttctccgccaccagcttcctctcctcctcctactttatcaccaccagtagtttggactactgctncagcgactcccccgaccgttagctgcccaccaccagcttcttctcccccggcnncnccacctgccgcaactcccccaccggc

SEQ ID NO: 2232 - DNA, 395 bp, Gossypium hirsutum
  Clone ID: LIB3493-001-P1-M1-F2
atggatgcatgtggtgttcaatccaaagtactgagtgattgtctgaccaacttcggaagtgatatcagcaaatgccaattctatatggatatgctgcaagaatgccgcaagagctccggtgcgttgggcgcttaatgttgaaaatctaatatcccccattaaggtcattgcaatttaggagtttgagtaggcgtgtcctttttagtttgtctatattgatgcaaacaatgggtttgctggtgggaaaatggcactatttaggataactcactgctgtaaacttaacatcgcatatctaaattaataaataatattttttattgcgatgtttcttttgagctgagattggtgaattaggtgagggtaggtgaataatattttcgatcactcgtttc

SEQ ID NO: 2233 - DNA, 401 bp, Gossypium hirsutum
  Clone ID: LIB3493-001-P1-M1-F3
cggacgcgtgggcggacgcgtgggcggacgcgtgggatggcgttgaaggcataaagaagtggcctctctttgtcgttcacatagccctcctttcttaaatattcaaaatctaccagcgttgttatatgtgtgtgtgtatatatatataattgagctgactttccaagctttatgatgattatccactaaatcatatctacatatatatattgccaaacaaccccccaaaagaagccaaaaaatcacaaaacaaaatctgggtttgtcttgaatggatgttgaaaagatgaaactgaagaaaaacatgttggctaaggcctgggacagatgcaaatctcttggaaatagtggcaagaactcatcggtgaatccattgatgaagaagagcaaatcatgtcata

SEQ ID NO: 2234 - DNA, 413 bp, Gossypium hirsutum
  Clone ID: LIB3493-001-P1-M1-F4
cggacgcgtgggttctctagaggtctggtctactcaacactttctcctccctcttagcaaccaaagactcagatccgctcggatttctttgtcccagaactagaatggagacctttctattcacatcagagtctgtaaacgagggacaccccgacaagctttgcgaccaggtctctgatgctgtgctcgatgcctgcctagcccaggaccctgacagcaaggttgcctgtgaaacatgcaccaagactaacatggtcatggtctttggagagattaccaccaaagccaacgtagactatgagaagattgttcgtgatacatgccgctccattggatttgtttctgatgatgttggtcttgatgctgacaattgcaaggtcttggttaacattgagcagcagagccctgatatt

SEQ ID NO: 2235 - DNA, 418 bp, Gossypium hirsutum
  unsure (1)..(418): unsure at all n locations; Clone ID: LIB3493-001-P1-M1-F5
gttggtgaagaaagtgaaataccgaaattcctttgttgaagctgcttggccgctaggcaatgccatcnaagctgtgtcatcaatgaagtaaaaattccaggtcagcatcatcaactttaaattagtcactgaaaaattgcatgacttgggttaatattggcatttgctaatcgaatacactgtaatttgcagaacgactcagaaattggattttttggtgcggaataatcggaagagaaaacagtttgatttaatcttcttcattggtaatttacaattttccccccctgatttttataatttttgngagagttaattgattagttcatttagtttgtaaactgattatgttatgttaccaatgtgtttgtgtccctaataccttnntggtagttaaaatgatgttcaattctcattt

SEQ ID NO: 2236 - DNA, 419 bp, Gossypium hirsutum
  Clone ID: LIB3493-001-P1-M1-F6
cggacgcgtgggctcatggatcagtgctaaaactcaggctgaatgttatcattacctctttgatgctgctgctatcaaactccatcatctaggcttagactggtctactccagatcatggccccattcagaatgttaaaggattttcaagcatcaatagcgtgataaaaagggtggctactaaggttgggacagtggattcgaattttaaactccagccatatccacgctgcattgtgcttgacattgaaggaactacaactcctatttcatttgtaacagatgttctctttccctatgcccgagacaatgttgggaggcatttgtctgcaacttacgatagtgctgaaactcaagatgatattaagttgttacgttctcaagttgaagatgacttgaagcaaggtgttctttgtgctg

SEQ ID NO: 2237 - DNA, 404 bp, Gossypium hirsutum
  unsure (1)..(404): unsure at all n locations; Clone ID: LIB3493-001-P1-M1-F7
ggttgggatcatgatgttggttacgaaggtattaatgtcgaaagactgtttgttgcaaaagagaaatttcctatttcattttctggccagattacaaaggacaaaagggatgccaatgtccaaatggaactagccagttctttaaagcatggggaaggtaaagcaacttcagtgggttttgatatgcagactgttggaaaggacttagcctatacactgcgcagcgagaccaggtttagtaatctgaagaagaataaggcaacagctggcatctcagttacactcttagttgatgcactatcagctggaatgaaatttgaagacaaactgattgctaataagcagttccaggtagtcatgactgggggngttatgacaagacgcggcgatcttgcttatggggg

SEQ ID NO: 2238 - DNA, 389 bp, Gossypium hirsutum
  Clone ID: LIB3493-001-P1-M1-F8
gtgattcagtgctttttatatggaatgataaaaatcaattacttcttggcatccggcgagctaatcgacctcaaactgtaatgccttcatcagtgctatcaagtgatagcatgcatttagggcttcttgctgccgctgctcatgcagctgcaacaaatagtcggttcactatattttataatccaagggctagtccatcagaatttggcataactctctcaaaatatgtcaaagctgtctatcatactcgagtttctgttggaatgcgctttaggatgctgtttgaaacagaagaatctagtgttcgtcgatacatggggacgataactggcataagtgacttagatcctgttcggtggccaaattcacattggagatcagtcaagggt

SEQ ID NO: 2239 - DNA, 402 bp, Gossypium hirsutum
  unsure (1)..(402): unsure at all n locations; Clone ID: LIB3493-001-P1-M1-F9
gagagatgctaagatggacaaaagcaatgttcatgatgtggttcttgttggtgggtctactaggatcccaaaagttcagcaattgttgcaagacttcttcaacggtaaagagctctgtaagagcattaaccccgatgaagctgttgcttatggagctgctgtgcaagctgcaattttgagcggcgagggcaatgagaaggttcaagatttgctgcttttggatgtcaccccactttcccttggtttggaaactgcgggtggtgtcatgactgtcttgattccaagaaataccacaatttcaacctaaaaggaacaggttttctccacctactctgataaccaacctggagttttgattcaggtttatnanggngagagaacaagaaccaaggacaacaattt

SEQ ID NO: 2240 - DNA, 407 bp, Gossypium hirsutum
  Clone ID: LIB3493-001-P1-M1-G1
agattatagcaccgatgataacgatccacgttttgatgggaaagaacaaacggaaaccaatttggcttttatgtataatcgaatggtgtccggcgctaagaaaacggagctgttcatgggatgtacatataaagccggcgacaagaactgtgattcgccgggaactatagagagtgcacctcataatactttacatacatggatcgggtcgggtttaaacccgggaagggaagatatgggcaagttttactcggcggcgaaagatccggttttttacgctcatcattcaaatatcgatcgtctttgggaagtttggcgggatatcaacgatcggaaactggatatcgacgattccgattggcttaattctttctttttattctacgatgagaatctgaatttagtaa

SEQ ID NO: 2241 - DNA, 123 bp, Gossypium hirsutum
  unsure (1)..(123): unsure at all n locations; Clone ID: LIB3493-001-P1-M1-G10
cggacgcgtgggcggacgcgtgggtttttcttttgccttaaaaaaaaaaattaaaacctccatgtccttcaaattacaattacatgcgaaggaggaaggatnnnnttgtcattgatcaaacac

SEQ ID NO: 2242 - DNA, 419 bp, Gossypium hirsutum
  Clone ID: LIB3493-001-P1-M1-G11
caaatctctttagggcgtttctcataacagagcaaccatgagctccatcattcaaagctttcaaaagaacagctccctccccgtctcccaaactgaatcaaaagaccactttccaccaccaggaggcccagggctgctgcgaagaaggctttcatctctgtctctaaaactacaacccacttcttcaccggcgacgtcatggacattccccagatccaagtccttgtcttccatgggagaatacgccggtagctccatcaggaaatggtgggactggggttggtcttgggttctctccaaaaagccctcgttcgctaaagacattgaaatgaacgaagaagaaaccaggatccttgggtgccacaacaaaggcagttggtggcatgtgttttataaagtcagatctgagatcagaaaac

SEQ ID NO: 2243 - DNA, 418 bp, Gossypium hirsutum
  unsure (1)..(418): unsure at all n locations; Clone ID: LIB3493-001-P1-M1-G12
gaaattntnnggaacactctctacaaagcataccttgaagatttttacaagttttgtcagaaactanncnntgcaactgctgagataatgtctgacctcttanccnttgaagctgataggagagctgtcaatattacaattaacagcattggaactgaacttactcgtgatgatcgtgtgggagtatgcggtaagttcggtctggtttatgcttattggcacagggaacttgttgtctgtgaagatattgaccaggttcgtggtgcaatggaaaaatatcctccctatcaatcgattttctctaanttgttatatggagatagtcanatgcttgacaaagcattttacgaggaggaagtgaaaaggctttgcttagctttnnancaacagttccattacggtgttttctttgcataca

SEQ ID NO: 2244 - DNA, 279 bp, Gossypium hirsutum
  Clone ID: LIB3493-001-P1-M1-G2
cccacgcgtccggctatcagttcaaagggttcgttaatttagggtctaatccagtcaggtcccaacaagtggctggggtttaatattttgttggatcacagcttatagatatcaaatttatatatattattttactgattctttgatttgtttgagggactacgagctctaaattatgtgctaacgggccctttctttttgtaagtaattatttttagcagtataaatgaacttgtaacaaccatatttgcatatcaatattttcgataattaattttc

SEQ ID NO: 2245 - DNA, 404 bp, Gossypium hirsutum
  unsure (1)..(404): unsure at all n locations; Clone ID: LIB3493-001-P1-M1-G3
gattgtttgaaggaggataatattataggcaaaggaggtgctgggattgtgtacaagggatccatgcctagtggtgaccatgttgccgttaaaaggttaccggcaatgagccgagggtcttcccatgatcacggattcaatgctgagatacaaactctggggaggattaggcacaggcatattgtgagattgttgggtttttgctcaaaccatgaaaccaatctcttggtttatgagtatatgcctaatgggagtttaggagaggttcttcatggcaagaaagggggtcatttgcactgggataccagatacaagatcgctgtagaggctgctaagggactatgctaccttcatcatgattgttcccctnngataggccacccggacgtgaaatcgaacaatat

SEQ ID NO: 2246 - DNA, 410 bp, Gossypium hirsutum
  unsure (1)..(410): unsure at all n locations; Clone ID: LIB3493-001-P1-M1-G4
gctgatcttattgttactcaactgttttatgatactgatatctttctcaaattcgtcaatgattgtcgccaaattggaattacatgtcccattgtgcctggtattatgcccattaataactacaagggtttcgtgcgaatgactggcttttgcaaaactaagataccggatgaggtcactgctgccttagagcctatcaaggacaatgatgaagctgtcaaatcctatggaatccacctcggaacagaaatgtgccgcaagattttagcccatgggattaagacgttgcacctttatacattaaacatggagaaatctgcattagctatactaatgaaccttggactgattgaagagtccaaaatttctaggtctttaccttgganacgccctgcaaatgtcttccgtgt

SEQ ID NO: 2247 - DNA, 418 bp, Gossypium hirsutum
  unsure (1)..(418): unsure at all n locations; Clone ID: LIB3493-001-P1-M1-G5
ggctggttctcctttttcagctggtataatttcagcaaatggtttggtagctcattctcgtagccatggtggtgggtttgctgttcgaactgagccttgcatggcccgttctgttagtgtgcctggatgctctgaggtcgtaagtccaccatcattgccttctcaagatgaaaatcttgacatggtcaaggatgcatccactgatatttctcgtacgggttcaagaagagacatggcaacccaaatgagcccacagggtagcacttgctcatcaaccaaagaatcggcttctttctctctctccaccccgggtgctctacctatcatggaactgcaaagcatccatgcctctaaatcagaagtgagagatgtacagatagatnaaagantcaccatgactaggtggtcaaagaagcat

SEQ ID NO: 2248 - DNA, 420 bp, Gossypium hirsutum
  unsure (1)..(420): unsure at all n locations; Clone ID: LIB3493-001-P1-M1-G6
cggacgcgtgggttcagatggcacgatcaaagaaagcatgcattgtgttctttgatgaagttgatgcgattgggggtgcacgttttgatgatggtgtaggtggagacaatgaggttcaacgtaccatgcttgaaattgtgaaccagctcgatggctttgatgctcgnggaaacatcaaagtcctgatggcaacaaacaggccagacacactagaccctgcattattacgtgctggacgactggatcgtaaggttgagtttggtcttcctgatttagagtctcggacacagatattcaaaatccatacaanaacaatgaattgtgaacgtgatattagattcgagcttttagcccgactttgcccaaattccacaggagccganntaagaagtgtgtgtactgaggccggaatgtatgcca

SEQ ID NO: 2249 - DNA, 403 bp, Gossypium hirsutum
  unsure (1)..(403): unsure at all n locations; Clone ID: LIB3493-001-P1-M1-G7
cgatcggtggtcagcccgctggtcggattgtgatggagcttttcgcagattgcactcctcgcactgcggagaacttccgtgccctctgtactggcnagaaaggcgtcggccgcagcggtaagcccctccactacaaaggctcttctttccatcgtgtgatccctaactttatgtgccaaggaggtgacttcaccgccggaaacggttccngangtgaattcatctacggatccaagttcgctgacgagaacttcatcaagaagcacactggtcccggtattctctcaatggctaacgctggaccgggaactaacggntctcagttcttcatttgcacggctaaaactgagtggctcgacggaaagcncnnnnngtttggacaagttgttgaaggcatggatgt

SEQ ID NO: 2250 - DNA, 350 bp, Gossypium hirsutum
  Clone ID: LIB3493-001-P1-M1-G8
aaaaaatgtcgcaaagtccggactctatttttccatctatccttcgtctccgtcgcttctcttagcgcgattcaccagcccttccaccgcgtacaggacctcctctatttagtattgggggttttcatgccgacatccttctattgccatcccgtgagccgctttgttggcttcccttgagtttaatttgtgtattatggttaacgtatctccttcaacacaaatatcctggaaacccatttcctctgccatagtaatggcctgcaaacacgcccttgcctcgaccataaccggatctgcgatattctcccatgggaagagattcaaaaaatgaaagattctggcttggg

SEQ ID NO: 2251 - DNA, 360 bp, Gossypium hirsutum
  unsure (1)..(360): unsure at all n locations; Clone ID: LIB3493-001-P1-M1-G9
aaacaaagcattatactcgtactaagaagaaactagttgtaggcagctattatatcgtnnctcctttctcccttctcttaagagtagaatgattatnggaaggttacgccaatggttaagtctactggtctgtgtgcttgcagttatactactcaaatctgaaggcgctagtgtagggattacttatctgcaggatgccgtagcgaaaggagctgtttgtttggatgggagtccaccagcttaccattttgacaagggctctggcgctggagttgataattggattgttcacatggatggtggaggatggggtganatgtgccgacttgcctctttcgtaagaacaccgatttagggtca

SEQ ID NO: 2252 - DNA, 405 bp, Gossypium hirsutum
  Clone ID: LIB3493-001-P1-M1-H1
tgggttctaatatttttgcatttctctttatgcagaaataagaaacaattaaactgtttctgtcaaggaaatttgctgcaattttcagttttctgggaaaagtagaggcaaattttccactttttcgttctgggttgtaaggcaaagaacaagaagagcttcaactggtaaaatatggccgtctctctctatacacacacatgcatatatataatatgcattttttaaacgggtttgtagattttttttaatggatggatttcttgagttttcttgggattagttcaacatgttcttggtatggtataaaattccctcttggtggcagggaaaatttttaccagaagaagaaatgtaaaacaatggtgaccaaaacagtagatcttcgatcggatacggtaacga

SEQ ID NO: 2253 - DNA, 413 bp, Gossypium hirsutum
  unsure (1)..(413): unsure at all n locations; Clone ID: LIB3493-001-P1-M1-H10
gaaaagatcatttcttgattctcaaatttttctctagaggaaaaaatggctttagagatctgtgtgaaagctgctgctggtgcccctgatattcttggagattgnccattctgccaaagggttcttcttactttggaggaaaagaaggttccttacaagttgaaccttgttaatctcagtgacaaaccccaatggttcttggagataagtccagaaagaaaggtaccagtggtgaagtttgatgacaaatgggtggctgattctgatgtgattgttgggattattgaagacaagttccctgagccttttttgaaaacaccccctgagnttgcccatgttggatcgaaaatatttggtacctttatctcattttttgagtnncagggtgcanacaatggatcagagcangattt

SEQ ID NO: 2254 - DNA, 410 bp, Gossypium hirsutum
  Clone ID: LIB3493-001-P1-M1-H11
ctaaaatgcccgagatggccgatatgggttgttggaagtgagtcccattatactgtcctgtttgctctggatacagctgttcaagatgagaatgaattggaagaaagagaatcacagatccggaaagcttttgatgcccaagatcagagtggaggtggtgggtttattagcgtggaagctttccatcaagtgctgagggagacaagtatccgacttccatctgagaaacttgatagcctctgcaactcaggcttcatagtatggagtgagttctggcaggttattttggatttagacaagaacttgggaggtcttaaggattcaactggacagatgggtagaaagatatttgatctttaccattttaatgggattgcaaaatcagatttgaatggcagccaagcaacagc

SEQ ID NO: 2255 - DNA, 216 bp, Gossypium hirsutum
  unsure (1)..(216): unsure at all n locations; Clone ID: LIB3493-001-P1-M1-H12
tcgcaaactaatncaactcaacacttcacttaatttaactggccttggatggtttttcttatagatttaatgcataagagtccgtcagcttcttccttggttccaggnggtctagacctggctcaagcctttttcaagcccatcctaaacaccgatccaccttccnccaccaagcgccagaccagagatcngcggcntcggagttgggaacgtcgg

SEQ ID NO: 2256 - DNA, 407 bp, Gossypium hirsutum
  unsure (1)..(407): unsure at all n locations; Clone ID: LIB3493-001-P1-M1-H2
ttacttcactctccctctgtcttcaagaaatggatcgtagaagtgcatttgcagttgttttgatttgttttgtggtgaccgctgttggtggtcaatctccggcagcctcacctactaaagcttcgncggtcgcgactactcctgctactgctcccgctactgcccctgttagcaaacctaaatcaccggctccaactgctgcccctaccacttncccaccaactttttcaccaccggttgcggctccggagaagtctgcggcggttccagccccatctaaatctgctccgtcttctccttcggctgctgctccggtgagttctccaccggctccagtacctgtgagctctcctccagccagatcgccttccgttgctgcaccgacgactccaccagagagctcggct

SEQ ID NO: 2257 - DNA, 409 bp, Gossypium hirsutum
  Clone ID: LIB3493-001-P1-M1-H3
cggacgcgtgggcggcaagctcttactccaacgattgaagccattcaactgtaatctcctatatcatgatcgagtcaagatagatccagaattggagaaacagaccggagctaaattcgaggaggatcttgatgcaatgcttccaaaatgtgacattattgtcataaatatgcctctaactgagaagacaagagggatgtttgacaaagatcggatcgcgaagatgaagaagggagtccttattgttaacaatgctcgaggagcgattatggatactcaagcagttgctgatgcttgttcaagtggacacattgcaggttacagtggagatgtttggtatccgcaaccagctccgaaggaccatccatggcgttacatgccaaatcaagctatgactcctcatatttct

SEQ ID NO: 2258 - DNA, 416 bp, Gossypium hirsutum
  unsure (1)..(416): unsure at all n locations; Clone ID: LIB3493-001-P1-M1-H4
aaaaccttctgcattccacacggaggtggtggacctggcatgggacctattggtgtcaagaagcatttggcaccatttttgccttcacaccctgtggtacctacaggaggtatcccagccccagaaaaatcagaccctcttggtaccatttccgctgcaccttggggctctgcacttatcctgccgatatcttacacttacatagccatgatgggatctaagggactcactgatgcttcaaagatagctattttgaatgcaaattacatggcaaaacacttggagaaacactaccccgttcttttccgcggagttaatggaacagttgctcatgaattcattatagacttgagaggttttaagaatactgctggaatagagccngaagatgttgccaaacgtcttatggactatgg

SEQ ID NO: 2259 - DNA, 394 bp, Gossypium hirsutum
  Clone ID: LIB3493-001-P1-M1-H6
cttcactctccgatctctctactccttttatcgtcttcattaaggtttgatttcgtttctccgtcatggcaaagatcaagatcggaatcaatggattcggaaggattggacgtttggttgcgagagttgctctccaaagcaatgatattgagctcgttgctgttaacgatcctttcatcaccactgattacatgacctacatgtttaagtacgacagtgtgcacggtcaatggaagcaccatgaacttaaggtgaaggactcaaagaccttgctctttggcgaaaggcctgtcactgtttttggcatcagaaaccctgaggaaatcccatggggtgaaaccggagctgattatggttgtgagtctaccggtgttttcactgacaaggacaaagc

SEQ ID NO: 2260 - DNA, 382 bp, Gossypium hirsutum
  unsure (1)..(382): unsure at all n locations; Clone ID: LIB3493-001-P1-M1-H7
cccatctcagcttcatgaacatgagcctcaacagtacatcaacagtgggaaaaggcaagtccattacactcctattttcagattcttggacaaggcancagtgaaagatggcaactcaagtaagccaccttgcactgtaactcaagtggaaggaaccaagcttgttcttggaatgcttttaatatggctagtaaccttaatccccagcacaatatgggctcaaatgaacacattatttgtgaaacaaggcaccaccatggacagaagcttaagttcaagctttcaaatcccagcagcttcacttgggagctttgtcacattctccatgctcctctccgtaccaatgtacgaccgctattttgtaccatncatgcgtcgaaaa

SEQ ID NO: 2261 - DNA, 366 bp, Gossypium hirsutum
  unsure (1)..(366): unsure at all n locations; Clone ID: LIB3493-001-P1-M1-H8
gaagccctaaattttctcagcctttcttgctctttccctcgctttctcgggaaaaaaaatggcaaacgcggcttcaggaatggctgtgcatgatgattgcaagctgaagtttttagaactgaaggctaaaaggacttaccgcttcatagttttcaagattgaagaaaaacaaaagcaagttgttggggaaaaggttggtgaacctactgatagctatgaggctttcactgctagccttccagccgatgagtgtcgatacgctgtgtatgactttgattttgtgaccgatgagaactgccagaagagcagaatttttntcattgcctggtctcctgatacatcaaaagtaagaagccagatgatcta

SEQ ID NO: 2262 - DNA, 409 bp, Gossypium hirsutum
  unsure (1)..(409): unsure at all n locations; Clone ID: LIB3493-001-P1-M1-H9
tngggtttgaaaaatggagtccaacaccaaaatgtcagctcttcttttgctttgcatgctttncattncttcagtgacaccaattcttgggtgtggntcatgtgggaaagcaccacacaagcatcgaaagcctaagggaaagtcccctaaaggtcccatcactttgcctccccttgtgaaacctccaatcaagttgccaccggttgttgctccaatagttaagctcacccattgacctccctccggttacagtccctccaattaacctccctccagggacggttcctccagtaactaagccacctagtgggtaaccctgcccaacaccaccaaccaaggacacttgccccattgacacactgaaattgggtgctngngtggatctgctgggagggttggtgcacattgg

SEQ ID NO: 2263 - DNA, 410 bp, Gossypium hirsutum
  unsure (1)..(410): unsure at all n locations; Clone ID: LIB3493-002-P1-M1-A1
cccctcttccttttcccctcgctctcttttccttgccaccaaaaaacatctttctgttcaattcaatcctcctttttctattcaaccataatgtcttgcttcattagcaaatacgccgatgagttggctaaaaacgctgcttacattggcacccctggaaagggtatccttgctgctgatgaatccaccggcaccatcggcaagcgtctttcaagcattaatgtagaaaatattgaagaaaacaggcgtgctctccgtgagctcctcttcactgctccaggagctcttcagtacctcagtggtgttattctcttcgaggaaaccctntatcaaaaaaccgcttcgggcaagcccttcgttgtgttttgaaggaaggtgggtcctccctggcatcaaggtcgaccagggta

SEQ ID NO: 2264 - DNA, 407 bp, Gossypium hirsutum
  Clone ID: LIB3493-002-P1-M1-A10
cggacgcgtgggcggacgcgtggggttatttgtaactaagggaaaaacaaaacaataatattaatagtgagatgcaagaaagaaagtgaagaaacatagaaaatagcaaaagggtatctctctatttgtctctctttctctctctctctacctctttctttacaaatttttttttttggagtgattctcctctttcagctcagtgtgttttgcatacaaaaagagaaaaagagtgagacaaatatattttaaaacttttatatattttttaaaatatttggagagtctgtgtttggatataaagaaagaaaatgcagcagcacctgatgcagatgcatcccatgatggcagcttattatcccaacaacgtcactactgatcatattcaacagtatctcgatgagaac

SEQ ID NO: 2265 - DNA, 405 bp, Gossypium hirsutum
  Clone ID: LIB3493-002-P1-M1-A11
cggacgcgtgggttcaccgacaaaaaaatggcagcgaagcaaacgacgatcctcgttgccgccatcctcgtaactgctttttacggcggcgcggtgacatcggcgcaggcaccgtcagctggtccagcgatggccatgtcgccgtccgccatggcaccgacgccggactgtatgacgaacttgttcaacttatcggattgtttgacgtacgtggaggccggaagcaacttgacgaagccggacaagccttgctgtccggaattggctgggctagtggaaagtagccctcaatgcttgtgttatttgctggataagaacgcgacggcgaactatgggttcaacattgacatggatagagctcttaagcttcctgatgtttgccatgttaaaactcctcctgttagt

SEQ ID NO: 2266 - DNA, 406 bp, Gossypium hirsutum
  Clone ID: LIB3493-002-P1-M1-A12
atggtaattatgattcaccatacggttttaacagtccaagagatcctattccaaggccacgaagccccacctcgggaaggtcgtattatgagaggggtagaaggagccccttggtatatgaagattttggtagtcatggctcctacggttcaagatattctccaagagctcatggatttgaatatgagaccgatgaaagatgggacaacagctacctggattattcatctcggtatagtagccatcgatatcacagccggtggtgaatggcactgttgtaactttcaattttgtcactagatatgattgtttagcaccccctgtggcccacataacttgtaaagatttctagacaaagggtggatgcattgatagttttagcaacagtgaagtgggaaatcattgt

SEQ ID NO: 2267 - DNA, 419 bp, Gossypium hirsutum
  Clone ID: LIB3493-002-P1-M1-A2
atcggagtttcggcctagacctacgccttcgggaatttgcaatcgaaaaccgaatcaaaatcttcgcaatctcatccagctacaaaaaagaaaaatggatctcagaatcatgggtttcgattctccgctcttgaatactctccaacatatgatggatctttctgacgatacggagaagatcccgaacgcaccatcaaaggtttacatgcgggatgccaaggccatggctgcaacaccagcggacattaaggagtaccccaagtcttatgtgttcatcgtcgacatgccggggctgaaatcaggggacatcaaggtccaagtggaggacgacaatatgctcttgatcagcggagaaaggaagcgagaggaagagaaagaaggagccaagtacgtaagaatggagaggcgggtcggcaagc

SEQ ID NO: 2268 - DNA, 416 bp, Gossypium hirsutum
  Clone ID: LIB3493-002-P1-M1-A3
cggacgcgtgggcttccaccagcaatgcaacagaagatttttgagcctgctccacctcctgtgaaagagggtggccctcctggaaggaagattgtggtgtctacaaacattgccgaaacttccttgactattgatggcattgtttatgttattgaccctgggttttctaaacaaaaagtttataacccacgagtgcgtgttgagtccttattggtatctcctatatcaaaggcaagtgcacatcaaagatctggacgtgctggaagaacacaacctgggaaatgcttcaggctctacactgagaagagttttaataatgatctgcagccgcagacctatcctgaaatattacgttcaaaccttgcaaatacagttctcatcttgaagaaactgggaatcgatgatctggtacattt

SEQ ID NO: 2269 - DNA, 396 bp, Gossypium hirsutum
  Clone ID: LIB3493-002-P1-M1-A4
tcagggcgcataccctcgctcggttgaattttttcattaagacataaagagcactgcacataaattacattgcgtgagcattcgtatgcaccatcttaatgcttggaagtacataaacaggtgcatggctgttattcgctcaaggtgtgaggctagtgcgcgctgtccgtctaaagccttctatgaaacaggttgtagacaacgtctacaacgctgcttgtaaactagttgattttcaaaacacggctgttgaagcgcgccgtgaagtaaatatgtgggcacgagaaagagaccaatggtcttattaaagaagatcttcctccaggatcagctgatgctttaaccagacttatatttgctaatgcactctatttcaaaggagcttggaatgaagca

SEQ ID NO: 2270 - DNA, 415 bp, Gossypium hirsutum
  Clone ID: LIB3493-002-P1-M1-A5
cccacgcgtccgccaaacttaggggagcatctcagataattggtgttgatattaatcccgaaaagtatgaaaaagcaaagtgtttcggagtcacggacttcttgaatcccaacgagtataacgaacctattcaacaggttattaagcgaatatccggtggaggggcggattactccttcgaatgcataggcaacaccggaatggtaacaactgcactgcaatcgtgctgtgacggatggggtttaacagttacgctcggtgtaccaaaaacgaacccggaaatagcatctcattattcagcatttctttctgggaaaacattgaaagggtccctatttggaggatggaaacctaaatctgatcttccttcattagtaaacaagtacatgaaccgggaaatacaggttgatgagtt

SEQ ID NO: 2271 - DNA, 412 bp, Gossypium hirsutum
  Clone ID: LIB3493-002-P1-M1-A6
gctaaagtgtatgggggtggtgttgtgtagtttgtttggatgggagtccaccagcttaccattttgacaagggctctggcgctggagttgataattggattgttcacatggagggtggaggatggtgtgaagatgtgccgacttgcctctctcgtaagaacaccgatttagggtcatcaaagcaaatggtgaagcaatttggcttctctggactcttgagcggccagcaaaaatccaatccagatttctacaattggaatcgaattaaggttaggtactgcgatggatcatcgttcaccggggatgctgtcgatcgagctaataatctctttttcaaaggaaacagcatatgggaatttatcattgctgatctactagcaaaaggaatgagaaatgctaaaaatgctattct

SEQ ID NO: 2272 - DNA, 413 bp, Gossypium hirsutum
  Clone ID: LIB3493-002-P1-M1-A7
gtcagatcttgcaaattaagaaaagaatcgattttggatacaactgcatgtacattgaggacatacgtaaaattggtcaatgaggctggtcataatagttaggcacatattctaacgaacagtgactcttgctgacgatacatacaacagccccatcgcagcatcgatgtgattacaatgaaatctcctatatatgatttcttaatttgggcataaaaagagaacatgtttggtgtgattataattattagattttggtggtttgattgtaacaggatattaccttctcccgagagacgacactatgctcttgatcagcggagataggaagcgagaggaagagaaagatggattttatttttaattcaacctccccggaaaggtcaaacaaattcttcttcttcttcttcttc

SEQ ID NO: 2273 - DNA, 415 bp, Gossypium hirsutum
  Clone ID: LIB3493-002-P1-M1-A8
ggaaaacagctcgaagacggccggaccttggccgattacaacatccaaaaggagtcaactctccacctcgtcctccgtctgcgcggtgggatgcaaatcttcgtgaaaaccttgactggcaagacaatcactctcgaggtcgagagctccgacacgatcgacaacgttaaagcgaagatccaagacaaggaaggcatccccccagaccagcaacgtctcatctttgccggaaaacaactcgaagacggccgtaccttggccgactacaacatccagaaggagtcaactctccaccttgtccttcgtttgcgcggcgggatgcaaatcttcgttaagacgcttaccggaaagacgatcactctcgaggtcgagagctctgacacgatcgacaacgtgaaagccaaaatccaagaca

SEQ ID NO: 2274 - DNA, 413 bp, Gossypium hirsutum
  Clone ID: LIB3493-002-P1-M1-A9
cggacgcgtgggaaaattttcatttcgtgatatcgttaaatcacgttaaatcacgtgatggcgggtgctgacgtggaggccgtggatttcgagccggaggacgacgacctcatggacgaggacgccgccgccggtgacgcctcacctcaagcctccatgcctaagctcaagtctgccatcactggcggcgcttccgtttctctttctggccctaagaagactaaaggccgtggcttccgccaggacgacgccgatcgtcattcccatctcgcctcccgcgactttgactctatcggctctgacggtggccccggtccccagagatctattgaaggatggataattttggtcactggtgtacatgaggaagcacaagaggatgatttgcacaatacatttggtgaatttggtga

SEQ ID NO: 2275 - DNA, 418 bp, Gossypium hirsutum
  Clone ID: LIB3493-002-P1-M1-B1
ctcgtcacctcgagaattctttggatgatttgaaggtgtctgtagtaaacaatcacggcagcaccgataggaaaatgaaacagctggaaaatattttgaccgaggtgcaaaccggggttcatgatttaaaagaaaagcaagagataatggaagctcagttgcagcttgcaaagctgcaggtgagcaaggtagaccagccatctgaaacccagaatactgtgcggacagaatccgttcagcaagttgcatctgctccttttcaatctcaccaacagcttcccctggctgcctctttcccacaatcacttccttctgttcctcctctagctcttccccaaccgagtttgccaccacaggttcagcatgcgaaccagttccctcagagccatgttccttctgttcctcagcaagaccctta

SEQ ID NO: 2276 - DNA, 406 bp, Gossypium hirsutum
  Clone ID: LIB3493-002-P1-M1-B10
cggacgcgtgggtagtaatggttccacaggaactgctagatcagacagcatctcttccagcagtggcttctgattttcttgattgttgtaatttgtaagtgttcttccttaagcatgtctcttcttttccattgaagtgcaaggtcaatattgtgcagaatcacaaagactagaggtaaaataatctatgtgggatcatggctttgtttggggcactagcccatgtgaccgattgctccttttccaaattggactggttcagataatgagactgcattgtcggtcctgtagagagtaaattataagaaggatacaacctccgtgatatttcaaaatggaatactcatttgttgtttccactcagaaggtacaacatcacatctatacgcatttcacgattgtagca

SEQ ID NO: 2277 - DNA, 373 bp, Gossypium hirsutum
  Clone ID: LIB3493-002-P1-M1-B11
cggacgcgtggggtttgagtgtttttcagcttttcttttattttctttattcactataatctgaaagctatgaagatgccagtggcgttgctggtgctgctggcattatgcaatgcaatcaaagttaatggagaaggtaactatcttcaatgtgatcataacccgacgtcgcaaccgagaccccatagcgtttcaatattagaattcggtgctgttggtaatggcaaaactttgaataccattgcctttcaaaatgccattttctatctcaagtctttcgccgacaaaggtggtgctcaactctacgttccaccaggacgatggcttacaggaagtttcaatctcactagccatctcacccttttccttgaaa

SEQ ID NO: 2278 - DNA, 413 bp, Gossypium hirsutum
  unsure (1)..(413): unsure at all n locations; Clone ID: LIB3493-002-P1-M1-B12
gccaaagacatgggtatgctgatataatgtcaacaatgtttctttatattccaaaaaattctatgtaaaaaacccctcaaagtcccctctttgcttcatcaagccccactctttaaactatcataaacccaaggtttttgaagacaaacttgaaaagggttcattttcattaagtgaaacattttcaaaagctggcttgcttgctcttgtttcagcttccattttattggtagatcctgcacttgctttcaagggaggagggccttatggatctgaagtaacaaggggacaagacttaaccggcaaagattttagtggcaagacattgatcaaacaagatttcaagacgtccatattacgacaagccaatttcaaaggcgcaaagttgcttggtgctagctnctttgatgccg

SEQ ID NO: 2279 - DNA, 401 bp, Gossypium hirsutum
  Clone ID: LIB3493-002-P1-M1-B2
aaaaagaataaagaatatgaagagggtttcctttgttatcttgtgtgtggtggcactagcggtggtggtgttttcgggtgaaacatgcatggtggaggcagtgacatgtaaccccatcgagctcagtccatgcttagcggcaatcacgatgccgtcgcagcctccttcagccgcttgttgcagtaagttgaaggaacagcaaccatgcttttgtggttacattaaggacccaactcttaaacagtatatgaacaatcccaacattccaaaggtagctagctcgtgtggagttgcatatcctcctaagtgttaaaatgttgcttcattagagcatttccttcttcaaggactaatatgaataaatgaataattaaatgaaacataagtttatctattattat

SEQ ID NO: 2280 - DNA, 418 bp, Gossypium hirsutum
  Clone ID: LIB3493-002-P1-M1-B3
ggttgctgcagtagcatcaatactcagatctttgggtgaagatccattaaggaaagagcttgtggaaacacctagccattttgtgaggtggttgatgaactttgaaaatacgaagttggagatgaagctgaatggctttgcttgtggcatatccgatcttctcaaacctaatggggaaatcagctcccgcaacaacaaacagatgcattcggagttgaacctctcattctggtcacaatgtgagcatcacctacttcccttttatggtgtggtccatattggatacttctgccctaaaggaatcaatcaccttgggaagtcccttttgcggtcaatagtacatttttacggtttcaagctccaagtgcaagaaaggctgaccaggcaaatagccgaaacagtttcatcgatcctaggt

SEQ ID NO: 2281 - DNA, 301 bp, Gossypium hirsutum
  Clone ID: LIB3493-002-P1-M1-B4
ccgttctataacaaaggacaagtgtacagttcagattttggaaaaagctgtcgccacatcgaatgtcagcgatcaaagccttggagttgcacaagatgggagtgaaggtggctctgagcataaccgtgctgcagtatcaatccgttcatcttctgagtcacggcaacggcggttcgacacttcgtcgtaccagcagcgtgcagaggcattggaagggctgcttgagttcagtgcaaggctcttaaaacaacaaaggtatgacgaacttggggtgttgttgaagccatttggaccagagaaa

SEQ ID NO: 2282 - DNA, 410 bp, Gossypium hirsutum
  Clone ID: LIB3493-002-P1-M1-B5
gaaagttgtattctctgctgattctgtgctgtttgaattcatagatgggggttggaaagagcgtgggaagggagaacttaaggtgaatgtctcaacagctggggctgaaagagccaggttgctcatgagagctagaggaaattacaggttgattctgaacgcaagtctttacccagatatgaagctgacaaatatggacaagagaggtatcacttttgtctgcatgaatagtactggtgaagacaaagagggtctgtctacattcgctttgaagttcaaggacgcttccatagtcgaagagttccgtgttgctgtaatggcacacaaaggtaacacagctactgttctgaagacacctgaacattccccttaagctgcagaagcttgaaaaggtatctccgttagatctg

SEQ ID NO: 2283 - DNA, 374 bp, Gossypium hirsutum
  Clone ID: LIB3493-002-P1-M1-B6
gtcacgttgtgagcatgatggatcatgatatggatagaccattgatatacggtttcggaggcatggggtgtggagttcgtcgaatctaagctgctgaagaaacgctgatgcatcgaacattatgattgatgtgtgagggcttgggaaagaggatgtcaaagagattgagaaacagagcactatgtacataataggctatgactgagactcaaatgcggaggaaactggcggtaggtacaccagcaggatccatttatgtgaacaagtatacatgactgaccatagtatggctgagatgaaatacggtgtgcttaaagtggatgtgcaaagatcaaggaagaggagagtaatgacgagattaatgtgcaaattga

SEQ ID NO: 2284 - DNA, 415 bp, Gossypium hirsutum
  Clone ID: LIB3493-002-P1-M1-B7
caccaatacaggtggtaattgtacctatttggaagaaggttgatgagaaaacaggagttctagatgctgcatcttctgttgcagaaactctgaaaaatgctggacttaaggttaaacttgatgacacagatcagagaacaccaggatggaagttcaatttctgggagatgaagggagtgcctctgaggattgaaattggtccccgtgatgtttcgagtgggagtgtggtcatatctagaagagatattcctgggaagcaagggaaagtttttggaatatcaatggaaccttcaatattggaagcttatgtcaaagacagattggatgagatccaatcatctcttcttcagagggcaatatctttccgggacagtaacaatagtgatgtgagctcttatgaagaactcaaagaagc

SEQ ID NO: 2285 - DNA, 412 bp, Gossypium hirsutum
  Clone ID: LIB3493-002-P1-M1-B8
aacagagctgaagctgctcttacagaggctttgaaccagtctgggaagccatggcagataaatgaaggagatggggcattttatggtccgaagatcgatattagtgtatctgatgcattgaacaggaaatttcagtgcgcaacattgcagcttgacttccagcttcctgagcgcttcaagttggagtactcagcagaggatgaagccaagagggagaaacctgttatgatacatagagctatcctggggtctgttgagcgaatgtttgctatattgttggagcactataagggcaaatggcctttctggcttagtccccgtcaagcaattgtttgccctgtgtcagaaaagtctcagcaatatgcaatgcaggtccgggattggattcatgaagctggttattatggagatg

SEQ ID NO: 2286 - DNA, 412 bp, Gossypium hirsutum
  unsure (1)..(412): unsure at all n locations; Clone ID: LIB3493-002-P1-M1-B9
cccgagcagcatggtgagaaagctcttccttatgatacattagtggaaaggtcagaaggttattcaggttcagatgttcgattagtctgcaaagaagcagccatgcaacctttgagacgtttaatgacagtccttgaaagtagcctggaacaattgcccgacaatgagctgcctaaggttgggccaattacatctgatgatatagaaattgccttgaagaacacaagaccatcagctcatttacatgctcatcgctacgagaagttcaatacagactatggcagtcaaatactgggatgatggctgccaccgccaagatacttcttaattttccagattttctagtcttattaatgcctactacttagtactnggagtgagtttagactacggaaactagaagattactcat

SEQ ID NO: 2287 - DNA, 393 bp, Gossypium hirsutum
  Clone ID: LIB3493-002-P1-M1-C10
attacttatggtcaacatacgttgtagctctataataaggttcccccaaacggactggagctgcacactgggacaataggtactgaagatggcaaggaaaagaaggtgacaattgactgtgaacctttcaaacctataaaagcatctttggacctgtgtgataacaagttccatactgaagctgtgaatgagctcttagagtctgatgacaagtatggatttatagtcatggatggtaatggcacgttatttggtacgttaagtggaaacacaagagaggtacttgataagttcactgtggatctaccaaagaagcatggaagaggaggacagtcagaccttctatttgctcgattgagaatggagaaacggcacaactatgtgagaaaaact

SEQ ID NO: 2288 - DNA, 408 bp, Gossypium hirsutum
  unsure (1)..(408): unsure at all n locations; Clone ID: LIB3493-002-P1-M1-C11
cttgtgccgttgcatttttttcagagatgtgctcttttgcgcttctttcgatctggggaatatcaagatcggaatcaacggattcggaaggatcgggcgtttgggagccagagttgctctccatagtgctgatgtacgagctcatagctggtgacgatcctttcattaccaccgatgacatgacctacgtgtacaagtatgacagtgttcacagtcaatcggagcaccgtgagcttactgagagggactcaagaacccttatgtttgtggagaagtctgtgactgatatcggcatgagataccttgacaaaatgcctaggactgagactggaactgaatatgtggaggnaattactgccgttttcactgacaaggacaaagctgctgctccattggaaggggttgcaa

SEQ ID NO: 2289 - DNA, 401 bp, Gossypium hirsutum
  Clone ID: LIB3493-002-P1-M1-C12
ggaatttggatatgtttatgtagaatttcctttatttttatcttgtcatcaaaaagtatagataatataaaaaaataatggaagtcatagaccacttctttaatttttgtagtatttatatgtgatgaaacaaaagggtttgagtgtgggattaagtagagcttctttctagctatatccttatcagctttcaaagatggcaggaatcgcctttggtcgctttgatgattccttcagtttggggactgtcaaggcctaccttgctgagtttatctcaactttggtgtttgttttcgccggcgttggctctgccattgcttacaacaagttgacaactgatgcagccctagatcccgatgggctagtcgccattgctgtttgccatggatttgctctctttg

SEQ ID NO: 2290 - DNA, 414 bp, Gossypium hirsutum
  Clone ID: LIB3493-002-P1-M1-C2
ggccgagaagaaaaaaaggcgtttggagaaagctcttgctacttctgcagccatccgttccgaactagagaagaagaaacagaaaaagaaggaagaacagcaaaggcttgatgaggatggggctgcaattgctgaggctgttgctttgcatgtcctgattggtgaagactcgggggattcatgtgagattatggtaaacaaggatgaggggttcaaccgttgggattggggaaggagagctaggcttccccatcaggctcacacaacctctcaagggtgggtcgctaatgcatatagtggtggatgcgagtgggctgagtttggaagcagtgactggtccttcacgtatggagcttgcagaagggatctacatgcaccatggtttgaggatagaggctggggaaatgaagaact

SEQ ID NO: 2291 - DNA, 421 bp, Gossypium hirsutum
  Clone ID: LIB3493-002-P1-M1-C3
gggatgaaggttttggctcaagaatttcagcagattcatttctggtgataatggaagatggaatccaaaccttcatgaaatttctcaaggcagacaaggagaaaccatatcaaatcattaaagcattgcttggaaggaagagaaaaggttcacttgacccaacacttgtccgactcgtgaaaaaagttaatgccaaaaagaagatgaagcttaaagaccttggcagggctcacaaatgcctaaggaaagggaaaaacaaggtcgagaagatggagatattgatgggtctaattgacctaaaagtggtgtcaagggtgttgagaatgagagatctaagtgaacaacagttgcactggtgtgaagagaagatgaacaaattgaggattttggaaggcggtctccaaagagattcctcaccact

SEQ ID NO: 2292 - DNA, 406 bp, Gossypium hirsutum
  unsure (1)..(406): unsure at all n locations; Clone ID: LIB3493-002-P1-M1-C4
gctcgggntcgaccccatcgccgtcgccgaaaggacgatggcatatagctgatataatgttcaacaaatcgtttctcttatatgtccaaacaaattctaatagtacaaaaacgcctctcaaacgtcccctaatttgcttaatcaagccccactctataaactatcataaacccaaaggttttgaagacaaacttgaaaagggttcattttcattaagtgaaacattttcaaaagctggcttgcttgctcttgtttcagcttacattctattggtagatcctagcacttgctctcaatggaggagggccttatggatctgaagtaacacggggacaagacttaaccggcaaagattttagtggcaagacattgatcaaacaagatttcaagacatacatattacgac

SEQ ID NO: 2293 - DNA, 403 bp, Gossypium hirsutum
  unsure (1)..(403): unsure at all n locations; Clone ID: LIB3493-002-P1-M1-C5
gctgtgggtgtttgctcgttaagtttttttatttttcttatagagtaaaatggagatgaaaagtggacatggacctttctattttgaactgaacacgggagctaagatgccatgtattggtttagggacatggaaagctcctcctggtgtcgttggtgaagctgtcgttgctgcagtcaaggctggttataggcacattgattgtgctcatgtttatgataatgaagaggagattgggcttgcattgaagggactgttttcctcagggcaggtgaagcgcagcgaactcttcatcacatctaaactctggtgttgtgaccatgcgncctgagacgtccccaaggcattggcccgaactttgggagacctccaacttgactatattgatctctatcttatacat

SEQ ID NO: 2294 - DNA, 415 bp, Gossypium hirsutum
  Clone ID: LIB3493-002-P1-M1-C6
gtttgttttatatccctcggttggagaaatttcttctgtcattttcgatgccaccacaaagtggatggtgggtgatgctacgatttgtaatcgcacactgttatgtcctgttgttggcagacacgtttaatgaatatgccaatttcttacaatttgttgcagatgactccaataataggggagagatacagatgcaaagactgcgtggagaaaataggttttgacctatgcgaatcatgctacaaagctccggctaagatccctggtcgatttaatcagcagcataaacccgaacatcaattagaaattatacagcctttaagcctaagtgactttatatccaggctgacctcggaacaatccgatgatgatatctcagatgcacctggacataccgatgatgcttcacatatgc

SEQ ID NO: 2295 - DNA, 371 bp, Gossypium hirsutum
  Clone ID: LIB3493-002-P1-M1-C7
gaggcaagccatggcatgccctcaaagtttcaatctttcaatcattaaaacatcaactactcttaaaattttctccaatacctcaaatcaaaactcggttacaggttcataccttatgaacaaatgtgggttcaccccaaaatttgcttcatttgcttcaaaatatggtcatttcgaaacaactgaaagggctgattctttggttgcttttctggaaaatcatgggttttcgaaaacccaaatcttaaatctcataaaaagaaagccaagattgcttatttatgatactgagaaaacccttttgccgaaattggaggttttttactctatatggttttcaagggctgagcttactaaaatattgactagct

SEQ ID NO: 2296 - DNA, 385 bp, Gossypium hirsutum
  Clone ID: LIB3493-002-P1-M1-C8
ttctacttctgttacgatggcggctactaccttctctccttccttctccactccctcgctcaattcttcctccagagcccacaaaactttaaccaaccctaatctaggctttttggcctcagtttcgagatccttgaggtctctcaaagcaaccaggctgactactgataatgcttggggctcaactatggcctctcgtatgggcttcggtcctggcggccagacacacatatctctcgattttgagacctttgtcttcaagaaagagaaaggctccctcgctggtcaggacgagtacattgtgagaggaggaagagatttgtttaagttgctgcctgacgctttcaaagggattaagcagattggtgttattgggtgggggtcg

SEQ ID NO: 2297 - DNA, 411 bp, Gossypium hirsutum
  Clone ID: LIB3493-002-P1-M1-C9
gttaagacagtcgttcagtctgaagaagcaaaaattttttactttgttaagtcaatctttcagtctgaggaagcaaaaatttgccatgctattggcaaagatgcgaccaaccaaacttctccatcaactagccaaggtgctcaacatgctgcaaatggtcattacgatgttgcatccaacgacagtaaaagtggcccttccagacagggagtcaagatggaagcttctggagaagtgtcatctacaatcgatgtaaatttcattacttacgaggtttgcaatgatacttccaaaagagaaaatgtgcagcagcgcatgtgcaagcctgcagaggttgtctcagctggttctgaggtttgccatgactaacatgcatgatcagagaaacatcaaccgcaacagtgttggata

SEQ ID NO: 2298 - DNA, 411 bp, Gossypium hirsutum
  Clone ID: LIB3493-002-P1-M1-D1
cggacgcgtgggcaagaactgtatcaaaggctcaaatcatcatcaagttattactctgatacttcagcagtaattctaagcaatgtcgcttcttcttcatcaacatccattttggagtcagctccagttgctgggggagaattgggttactggaatccggcattttcatcatcgtggtctgatcttccaacaactaatggtgcatatccttaaaataaccctttacctttcgtttaatctcaccttttttttttatataagctaaaagtgttgtccatcggttcttctttcgtagtgcatcaggttgtttcttttctttctttttctttctcttttaggtgtgtttaattatttaactcatgagcgtgttccaaggatgtagaacaagtttctaaaagagatgaaaaatgt

SEQ ID NO: 2299 - DNA, 311 bp, Gossypium hirsutum
  Clone ID: LIB3493-002-P1-M1-D10
gacgcccctcaaattctctgattatcctttgtattttcttccctagtcggcgaaaccctatccaacgaaacttaaggatgtcgccagctgctgtggttgaagccgccaatcctgagactgagcaggttccttctactgaggaatccaagatagagcttcagagcgaggaggctgtggttgaagatgttaaagaagatgagaaagaacatgacgatgacgaggaggatgacgacgacgacgacgacgacgatgataaggaagatggtgcacaaggtgcttatggaagttcaaagcaaagcacaagtgagaag

SEQ ID NO: 2300 - DNA, 407 bp, Gossypium hirsutum
  Clone ID: LIB3493-002-P1-M1-D11
ctgttgtaatctggttgactggagggccaggttgtagcagtgaattggctttgttttatgaaaatggccctttcacaattgctgataacatgtctcttgtttggaatgagtatggttgggacaaggcttctaaccttctgtatgtggaccaacctattggtactggctttagttacagttctgaccgaagggacattcgtcataatgaagatgaagttagcaatgacctatatgatttcttgcaggcattctttgcggagcaccctgagtttgcaaagaacgaattttttataactggagaatcatatgctgggcattacattccagcttttgctgctcgagtccaccgtggaaacaaagccaaggagggaattcatataaatctaaagggatttgctattggtaat

SEQ ID NO: 2301 - DNA, 409 bp, Gossypium hirsutum
  Clone ID: LIB3493-002-P1-M1-D12
cggacttaagcatttgaaaggtatagccctcgtcgacgaggtttgccgccacacatcccacaatgaatattgcgtcgataccataatcccaaagccaccattatccggggaaaggatcgccagtaccactttgggttgggcacagataaaagctctggaagccggaaccatcatagctagtctacttaatgattcttcttccatcttacaagtggcaaagaaccctctacaggccaaagagcttctccaaatatgttgggattctaacatgaacaccatggaggacctttggattgctagcagtttattttacaataagatcatcaatcccatgattgctcgtctgtatcatgctgcaaataccaccagagtttgccaagatggcctaaaaggaaccggttttacagcc

SEQ ID NO: 2302 - DNA, 417 bp, Gossypium hirsutum
  unsure (1)..(417): unsure at all n locations; Clone ID: LIB3493-002-P1-M1-D2
cggacgcgtgggcggacgcgtgggcttgagaacaatggctggctatggttatgcatacagaggtggctacacgacctacaatggcggcgttgctccacgaggtggcaccgaggggtggaacaaaacaagctatagctcagatcatacgtgtcagcctgtgttcattgatgcagaagggaggaggaagccgatcacgtcttacactggtccgcacggtagcaccgagtattacgttacaaaaaccgagatcgtcgaggttccatatatggccgaattcaagcaaagggctcctgtaagagttgaggtggtgagggaccatggtgagggtaagctgatgactaggcccttaagtcccggngaatggcgggagagttcaagtcctgttcggtatcatactgaagagaaatggaataagcc

SEQ ID NO: 2303 - DNA, 417 bp, Gossypium hirsutum
  Clone ID: LIB3493-002-P1-M1-D3
ataaaactcgatatacgcacagcgaaattcattcttcgatcttcgaacgccggcggcgaaacaccgctttgtttaccggtgacgtcgttttcttcagatatctgaaagatgtccggtcaatcccagcgcttgaatgtggttccaactgttacaatgcttggaatcatgaaagctaggcttgtgggtgctacaagaggtcatgcacttctcaagaaaaagagtgatgcccttactgtacaatttcgtcagattcttaagaagatagtatctacaaaagaatcaatgggagagattatgaaaacctcttcattttccctaactgaggccaagtatgttgctggtgagaacatcaagcatgttgtccttgagaatgttcaaaatgcttctcttaaagttcgatcccgacaagagaatgtt

SEQ ID NO: 2304 - DNA, 413 bp, Gossypium hirsutum
  Clone ID: LIB3493-002-P1-M1-D4
agcaaattgaacgcttcatggttgatttgaagaggcttgaagtgcaagctagagatggaccatctgatccaaatgcgcttgccaagtggcggatacttaatcgcttgcatgacagaaatgagactatgtactacaaggttctaattgccaacatcgaggaatatgctcctattgtttatactccaactgtcggtcttgtttgccagaactatagtggtctgtttagaaggcctcgaggaatgtactttagtgcagaagatcggggagaaatgatgtctatggtttacaactggcctgctgatcaggttgatatgattgttgtcacggatggaagcagaatattgggtcttggagaccttggagttcagggaattggaattgctatagggaagctggatttgtatgttgctgct

SEQ ID NO: 2305 - DNA, 418 bp, Gossypium hirsutum
  Clone ID: LIB3493-002-P1-M1-D5
cccacgcgtccggtttcattttatttctatttctatcatttatttgcttctatagtggtgtctcaaaagccgcgaagatagattcggatcgtaagaggaagaaatcttcgatctcatccgcagatcgaacggcggcgaaggcgggcgatcaacataaagataaagctcccacttcctccaccaaccaccaccaccaccacaaaaagaagagcaagatgtcttcttcatcgcccgccaatcaagtgagggcctctcacatcctcatcaagcaccaaggctcccgccgtaaggcctcttggaaggatcctgaaggtcgcgtaatctccaacactacccgagatgccgccgtctcacagctcaaagccctccgtgacgacatcgcttctggcaacgctaagttcggtgaggttgcctctcg

SEQ ID NO: 2306 - DNA, 413 bp, Gossypium hirsutum
  Clone ID: LIB3493-002-P1-M1-D6
cgcaaatgtataagaaagaatgctagcttgggacaattatatggaaatatgcaagaagcctatcagcaaatgcagacccctttagtttaccaggagccttcagctagaggactacatgaactaaaagaatcaaccgttcaagctgctacgtgtacaggcaacatcgatgcccctattgacgaaactttgtttgatatggagaaagagattgatgatctattgcctgttgaagtaaaagaacagcgtctcagcaacttgcttcaagccaccatggtaggaggatgtgttgcagcaatgcctatccttaaaatgatcccgacttcagtcctctggggctacttcgcattcatggctatcgaaagcttaccgggtaaccaattttgggaaaggatcttattgctcttcactgcacc

SEQ ID NO: 2307 - DNA, 411 bp, Gossypium hirsutum
  Clone ID: LIB3493-002-P1-M1-D7
gcgcggacgcgtgggcggacgcgaggggggacgcttgtgatcttaacttacatgtgatgctttggcaggaaggctaagcatggaagcttcagctatagcaacatgcatggagcagtcaggttcagctgctgggggagaattgataaactggaagccgggcttttcatcatcgtggtctgatcttacaacaaactaatggtgcatatacttaaaataaccctttacctttcgtttaatctcaccttttttttttatataagctaaaagtgttgtccatcggttcttctttcgtagtgcatcaggttgtttcttttctttctttttctttctcttttaggtgtgtttaattatttaactcatgagcgtgttccaaggatgtagaacaagtttctaaaagagatgaaaaatgtt

SEQ ID NO: 2308 - DNA, 410 bp, Gossypium hirsutum
  Clone ID: LIB3493-002-P1-M1-D8
agtggccataaatatgatacaactaagatcttgacaccgcagtatgatctgaatatttctgcatataacagttatagcaaactctaccttagcccactttttgccttatctattggatcaggattcgctaggttcacagcaaccctcactcatgtggcattgtttaatggcagtgatattctgaagcagagcagatcagcaatgaagaatgtgaagctggacatccatgcaaagctgatgaaaaaatacaaacaagttcctgaatggtggttttacattttactaatcggaagtatcgttctgtcacttatgatgtcctttgtatataagaaggaggtacagctgccatggtggggtatgctccttgcctttgctttggcctggattgtcacccttcctattggagtcat

SEQ ID NO: 2309 - DNA, 337 bp, Gossypium hirsutum
  Clone ID: LIB3493-002-P1-M1-D9
ggttctttaagactggacgatattaagctttaaccttaccaactaggaagtaatactgaattttaatatgtttgaagaaaataaacatgtatacaccactggaacaatatactgaaaaaactggttgaagacgtatagttcagattgatgatactgaaatttagcataaaacagccgatgctcattgctattctcctaacaggaagaactatgtacctctttgctaagaacgatatgatgcactctattatcaggcatgagaacgatgtattactggaactggcaacagacgctgaattactattcagaacaagtgctctagctcacattggagctc

SEQ ID NO: 2310 - DNA, 405 bp, Gossypium hirsutum
  Clone ID: LIB3493-002-P1-M1-E1
ggagcgtccaagccatgatttccgcttttgaatgcgtccatgatggttggggtgtttgtgtgctggtgggtgtgccaaaaaaagacgatgcattcaaaactcatgcaatgaatctactaaaagagaggacccttaatggtgctttttatggcgactataaaccacgcactgatattcccatggatgtcgacaaatatttgaacaaggagctggggctggatatggacaagttcatcacacactctgtgccttttgccgatattaacaaggcattcgactacatgctccagggtataggtctgagatgcatgattcatttggatgcttaaagaaatgttgctgctgtatatttgcccatgcaaggatcaaaactctaatgttttgtcctactatgtgttatattat

SEQ ID NO: 2311 - DNA, 408 bp, Gossypium hirsutum
  Clone ID: LIB3493-002-P1-M1-E10
cggacgcgtgggggtacatgccgtttggttctggaaggagaatgtgtgccggagtatctctcggtgaaaagatgttgtattcctccttggcagcaataatccatgcttatgattggaacttggccgacggtgaagaaaatgacttgattggcttatttggaattattatgaagaaaaagaagcctttaattcttgttcctacaccaagaccatcaaatctccagcactatatgaagtaactttactattgtatttcttttataccactttattgcctctttgtcatgtttaggcaacaattctaagtaataagtttggctatatggtgaagaataatgtgtttattatacatcataagcaatgagctcttcccgaccctagggcaatacaatgatactgtgtattaag

SEQ ID NO: 2312 - DNA, 410 bp, Gossypium hirsutum
  Clone ID: LIB3493-002-P1-M1-E11
aaccccgatgtccgccgcacccttctcaccatctccaataactacacactcaacgccattatcgttgacttcttctgcaccagcgcagcattcgaagtggcctccgatctcaaccttcctgcttactctttcctcccatccgccctcggtgctgttgcttgcttactttatttgcccaccctcagtaacaaatttactcaaagcttccaacatctcaacgttttccttgatatccctggtgcgccaccgattccatctgcagatatgccgccgacaacgttcaaaggcaacaagctgtatgacattttcttagacatcgccaccaacttgcgccgttcaactgggattattgtggacacttttgaatatctcgagccaaagagcttcaaagagattaatgatggactctg

SEQ ID NO: 2313 - DNA, 406 bp, Gossypium hirsutum
  Clone ID: LIB3493-002-P1-M1-E12
aaacaaagcattatactcgtactaagaagaaactagttgtaggcagctattatatcgtttctcctttctcccttctcttaagagtagaatgattattggaaggttacgccaatggttaagtctactggtctgtgtgcttgcagttatactactcaaatctgaaggcgctagtgtagggattacttatctgcaggatgccgtagcgaaaggagctgtttgtttggatgggagtccaccagcttaccattttgacaagggctctggcgctggagttgataattggattgttcacatggagggtggaggatggtgtgaagatgtgccgacttgcctctctcgtaagaacaccgatttagggtcatcaaagcaaatggtgaagcaatttggcttctctggactcttgagc

SEQ ID NO: 2314 - DNA, 411 bp, Gossypium hirsutum
  Clone ID: LIB3493-002-P1-M1-E2
aattcctcatttcaagggagagagtgtatcagtgtttcttcccctctttacttaatttctctccgccatggctctctccgtcgagaaaaccgccgccggccgtgagtacaaggtcaaagacatgtctcaggctgacttcggtcgtctcgagatcgagttagctgaggttgaaatgcctggtttaatggcttgtagaaccgagttcggccctgcccaacctttcaaaggagccaaaattactggttctcttcacatgaccatccaaaccgccgttcttattgaaacccttaccgccctcggagctgaagtccgttggtgttcttgcaacattttctctacccaagaccacgctgccgctgccatcgctcgtgactccgccgctgttttcgcttggaaaggggagaccctcca

SEQ ID NO: 2315 - DNA, 410 bp, Gossypium hirsutum
  Clone ID: LIB3493-002-P1-M1-E3
ctttgcactgaaactgcgtcgtttttcgaagctccatacaccaatgctcttctagcagttcatcatccaaaaggttcttcagcttagaagaagatcgagcaaatttcgattggttttttttttcttttacacagaagattttcccgctttatttataaagtgcaggttgttctctttgatggcttcaccggttactgattcagccggtttatcaccctgtatcgaaactgtgtcatggaatgcagatatggtcggtactttgcctatgccggaagcggaagctccgatgtcttcttcggtgttgaacaactgtaacataccgaaaccgccgcctcttccgagtaagattgtaacgagaaacaagcatcccaaatggcctcccgagagtagctttgccccaaaggaaacga

SEQ ID NO: 2316 - DNA, 415 bp, Gossypium hirsutum
  Clone ID: LIB3493-002-P1-M1-E4
aaaaaattaaagaaaaaaaagaaaagtaaaaatggaagaggagagactggaaatgaagttgggaagttacggagggaaggtgagtgtgttggaatgggagacagaatcgggtgctgcggaggagacgatgctgctttggggaatccaacagcccactctctccaaacaaaacgccttcgtttcccactcttctctccaactccgtcttgatgcctgcggccattctctctccattctccagtctccttcttccttgggaaaacctggagtaactggagcagtcatatgggatagtggagttgtgttaaggaagtttttggagcatgctgtggacttgggaattcttgttctgcaaggcaaaaaggtcgttgaattgggctctggctgtggattagttgggtgtatagcagctctt

SEQ ID NO: 2317 - DNA, 408 bp, Gossypium hirsutum
  Clone ID: LIB3493-002-P1-M1-E5
gtcgcgacggccgccctatttttttttttctaacgatgaaaaccaggaattttataataaacaccatccgacagagctatcaaagctcaatggtgcactcaatcgaggaaagactatacaatggaccgttactcaatcccctttccagaacagcctcagaatgaaacgagcaaagactatggggtaaaaggaacccttctagaggccagtcggagcttgtgtcttagcgtctgccataagccagcagctgtcccacgacattgcaggtattggctatatataggcaaatgcctccatgcacgatcggcgcactggcatggacactgatactgttgtgtgccagttaagttaggttgttctaacttatttgtttgatatatgaagtgtgtttatgttgtgtgtgttggg

SEQ ID NO: 2318 - DNA, 416 bp, Gossypium hirsutum
  Clone ID: LIB3493-002-P1-M1-E6
gtcccttctatatctcttcttcccatcattcatgcctctctctccccttccatttttttttttgttacatcaatcataacttttcattcctttgaacacaaacccaagaaaataaagagtgacttccttccttcctccctgcgtttttgttctctatttagcttaagaaatttatacacattttcttatgaaacatacggagccaaggagctgcaaagagttttctatggtgaaatggaggatgaggaggaggcggactgcttgcagtggcggaggcagcaccggtggtcgatcagttagaatgaagatcaaaaggttgcaaaagctaattccgggagggcaattgatgcaaccggatcgcctgttcttgaggacggcagattatatactgcatttgcgcttacaacttaatcttt

SEQ ID NO: 2319 - DNA, 408 bp, Gossypium hirsutum
  unsure (1)..(408): unsure at all n locations; Clone ID: LIB3493-002-P1-M1-E7
gtcaggtcgagttcctatcaatgaagctngaagcagttaattcaggaataaaccctgccattgaagtatttccttgtaaagattatggccaacaagcgtttgatgctactggtatggcattcggttcgcaagtgataaaggaatacagtggtggcacatcgccagagtggttgcacattggcagtgctttcgaaaggacaacataatcgggtaaaggaaatccccttgcaattacaaatatgagcattaaattaatttgcagtgcatctagcttgggtcggccaaagagactatatatttcctttgtcaacataaaggcatggagcctccattggagaaagctagagttagtatttgatgaaaatgttcattattgtgtnttggagagtgtgttcctttacttcatat

SEQ ID NO: 2320 - DNA, 410 bp, Gossypium hirsutum
  Clone ID: LIB3493-002-P1-M1-E8
ctctttttgtgtcatatatatctgcaagagagtgacatcatttatatccttaactagttcatataatcatttgttcgaataaacttagcttaatcttgatataaaagaatgggtctctcaagtctcccagccccatcagaaggagtgctatgtgtactcttggtaaacacagctttatccatatctatggttaaaggcataattcgatcaatccttcacattatcggtatccatctctcctcgtcctcgtcctcgtcctcctcctcctcctcatcatcatcatcatcatcatcgccatcctcggatcttattgaaatccctgcggtatcattcgacatcagcatcggtaatgctgatagttacattaaagagttccggagcaggatgccatcgacccggtacgatgcggt

SEQ ID NO: 2321 - DNA, 408 bp, Gossypium hirsutum
  Clone ID: LIB3493-002-P1-M1-E9
cggacgcgtgggtgaaaatccaaattcaatggctctacattctctatcctcaatcttacctttccaaaaccccattttctcctccctctcctctccactttctccttatcaccgtcaaatacgccaccttagaccgatggttcccttggcgatctctcgtcgcttcaggcctcgccgtaaacatacccagaaacgaagcggtacgtccatgttcctcccgctttcatccagaggaaacgagtcgcttttagattctagaaatagttctggaaatggagactcgatagcgatggagcaagagtccagtacctcgatgagttcgatcgctagttcgaggaagaaagacaggtatacaggcaacgcccgaagattcagaattttcggcgttgatttttctccagacagtgt

SEQ ID NO: 2322 - DNA, 169 bp, Gossypium hirsutum
  Clone ID: LIB3493-002-P1-M1-F1
atgatatatagctacataataaaaatggatggcagcgctctttatctttgtcgtagttgtccctagtaatataataaaacctcaagctattgcatgagttttgagttaattgaatgacaacgtataacgaagaaataaaatatttgcaattttctttttctttcatttt

SEQ ID NO: 2323 - DNA, 409 bp, Gossypium hirsutum
  Clone ID: LIB3493-002-P1-M1-F11
gttacgatatttgtattaagaatcgccctttagtgatcagtgaggtgaagaaaaatgtcttgctgtggtggaaactgcggttgcggcttcggttgcaagtgcggcagcggctgcggcggttgcaagatgtaccctgagatgaactttgctgagcaaaccacaaccgggacacttgttcttggcgtggcaccccggaaagtgcactttgatggagctgaaatggaaactggggctgaaaatggctgcaaatgtggagataactgcacttgcaacccttgcaattgtaaatgagaaaaaaaagctaagcataatatggaagctgatctaaataatatatgatgtatttgggtttttactattagaataaagcagctatggttcattaggtgttttgcttcttgtatccatg

SEQ ID NO: 2324 - DNA, 411 bp, Gossypium hirsutum
  Clone ID: LIB3493-002-P1-M1-F12
cccttctgaagttcatattcacatcaggcgtgttaccctggatgacatcccgttgtccgaaagggaagtaacttcttggttaatggatacattccaacgtaaggatcaattgctttctaatttcaattccgaaggttatttccctctgcatggagcagaattgaacctctctacagtcaagtgcctcataaacgtcatgctggtgcttgtcttgactggtgcattcacatttttaacctttttctcttccatttggtttaagatttttgtatcgttatcttgttcctatatggtttctgctacttatttaaacatccgtccagaacctatcttcaactttgtcaaaactagtctttaaacctaatttcttccaagttattattatgcaacttcgataggtattcattcaca

SEQ ID NO: 2325 - DNA, 414 bp, Gossypium hirsutum
  Clone ID: LIB3493-002-P1-M1-F2
tctctctctctccaaaaaaaaaaaaaaagaaaacgaaaaaaagtttcgcttctttgctttctttcgagtaaaaatcaaacgaaaaacaacttaaataatattaaaagattttgattttgatcatcaaattttctgtttctgatccaccagtccagtcagagtgttgaagtattgaagctgtctggtgttttgtttgttttttgaaatctgatgtctccgccgcttcttggcgtggaggaagggggtcagaacaatgtgactttactgggttcttctggctctattgatagtgtgtgccagaataatgctgaattgaaggagcgcaattacatgggcttgtctgattgttcttctattgattgctctgttgtcacccttggttccgacgatagcaacgtaagtttgaatctgaag

SEQ ID NO: 2326 - DNA, 372 bp, Gossypium hirsutum
  Clone ID: LIB3493-002-P1-M1-F3
cggacgcgtgggtttcattattgtcgatcgctacggtttgaagacaaaccagattactcatacctgaaaaggctgttccgggacctttttattcgtgaaggatatcagtttgactatgtatttgattggactatactgagatatccacaggttggctctagcacaagagcacgggcaagcccaaagccaggtttaagtccccccggagtatctgctgaaagaacagaatggccatctgttggccaagagattcgagaaaggttttctggtgcggttgaggcatttgcaagacggaatgtctctggccatggtttgcatggtgatcagtctagacacagatcttcagatgacgtgccatcatccaaggatgca

SEQ ID NO: 2327 - DNA, 418 bp, Gossypium hirsutum
  Clone ID: LIB3493-002-P1-M1-F4
caaaggcacgatgcaggcgaacgagttcgatggaaacgcggcctttgccggaggcggattcatgccttttcaggctactcagaccgctcccgaccgtccatcctcttcctccaaaaacagtgatgcgcgttgtttgactccagttacagtaaagcagttgaaggatctctctaaagttggagagtctggtatttccattgacggtgttgatgtcaataatattgtattggtgggaatcatatccaagatagacaatgctgtttcagattgtacttttagagttgatgatggcacaggatgggttgaatgcaccaaatggattcatgaacatgtagactcagttgaagtagatgtgctttcggttggaatgtatgttcgtgtctatggccagttcaaaagcattcaaagtagaaggtcc

SEQ ID NO: 2328 - DNA, 413 bp, Gossypium hirsutum
  Clone ID: LIB3493-002-P1-M1-F5
ggaatattactttgtgcaaagacaaaagttgctaaaactcgcttagcagcatattttgctgatggaacatctcgtgtcggagctaccagtaataggaaagctgaacgaagtggtacgaggaaaatatcaaagatataccgagcacttgtgactggcatacttgttgatgacaaggttatcatcaatcagcctattggaattgtgcgatatcccggagtggccaaaggactatatgttgcttcaccctcagggaagcctgctttgagcaaagttgaagttcttgagagagatgaaaaacaaaactgtacattggttcaggttgagattgagtccggacggcctcaccaaatacggattcatctttctttcataggacatcccttgttggtgatccactgtatattgctgggggc

SEQ ID NO: 2329 - DNA, 418 bp, Gossypium hirsutum
  Clone ID: LIB3493-002-P1-M1-F6
cttctacattcagcgaaggggtgctctgagatcacataccaaaatggtgaaggccgttgccgtccttagcagcaatgaaggtgttagcggaactgttttcttctcccaagaaggagatggtccaactaccgtgactgggaacctttctggtcttaagcccggactccatggcttccatgttcatgcccttggggacacaactaacgggtgcatgtcaactggaccccattttaatcctgctggcaaagagcatggtgctcccgaagatgagaaccgccatgctggtgatctaggaaatgtcactgttggtgatgatggctgtgcaagcttctccatcgccgacaaacagattcctctcacaggcccaaactccattatcggaagagctgtagttgtccatgcagatcccgatgacctt

SEQ ID NO: 2330 - DNA, 355 bp, Gossypium hirsutum
  Clone ID: LIB3493-002-P1-M1-F7
ggcaagatcctcatgtaagttggctctgaaagaacttaaacaatggatgatgccacaaaaggttgaaacttcgttggcaacttatccatcgtcagctgaaattgtggcagaacctcttggagtcgtcttggtcatatctacctggaacttccctttttcattgtctcttgatccggtgattggagctattgctgctggcaatgctgtggtcctcaagccatcagaaattgcttcagccacatcatcactgctttcaaggctagtaggggaatatatggataaatctgctataattgttgttgagggtgctgttgctgagacctctgcattactagagcagaaatgggataagatc

SEQ ID NO: 2331 - DNA, 302 bp, Gossypium hirsutum
  Clone ID: LIB3493-002-P1-M1-F8
ctaatggcgaaacctttctaaaccctaaaccacctcactgtttcaatgacgatcccaaccattgcttctaatttctcactcaacccatcactctttcctcttaaaacttcttcaatttctcggcgcactgtcctatcccgtcatcaagcccccccttcatttctctcaataccccaagctttcattcccaggccggccccaaatttccttttactttctgggaaacggttggggctttctctcaatcgaaaatccaagttttatgctaatgctggcaatggaggagaagatggtggtgttga

SEQ ID NO: 2332 - DNA, 196 bp, Gossypium hirsutum
  Clone ID: LIB3493-002-P1-M1-F9
acccccgcgcgtgccgcgcccggattccccgggcgagccacacgcgcgcccacacgtgcgctttgtggagacacttaactctgctctgctgtaaattctcgatcgccgcgaaaaaaaataatggggaggggaatcttcttcggcgcggattggggaagcactggggcccctccgggggaggataaaaattgggggg

SEQ ID NO: 2333 - DNA, 412 bp, Gossypium hirsutum
  Clone ID: LIB3493-002-P1-M1-G1
tcaatgccgggaatgttctagtaattgaagacaatgaacctgctgcaaaatggctagcccttataaaccacgcacttaacaagccagattacgatttaacgcacccatctcccgacgctagccaaagttcgaaacatttcaatacgctattgaaggatcacttcttctataaaccgtcactcaaagtcctgagtaggaatttcagggctgaaagcagccttctcaagacctgcaactgtcccgttgaatccacacatggggagaagcgaggccaaaaaaagcttagggatttagcaagcaaactagaccttggtccccttcctgcgcgtcgtgatggtgcagttgatgagttggttgacctttctggtatgccccccaatttttcaagtggccagatgggttaccggctcgt

SEQ ID NO: 2334 - DNA, 411 bp, Gossypium hirsutum
  Clone ID: LIB3493-002-P1-M1-G10
gaattattcacctttgctttggcccttctggtcggagctcttgttgtcaacgccttatggcgatggcggctcgactggaaatcgttgtttaagactagaaaacttcctccaggtccaccaaggtggcctatagttggcaatcttcttcaattaagctcactcccacatagggacttagcttccttatgtgacaaatacggtccactagtgtacctccggctcggtaaggtagatgccatcaccacgaatgacccagatatcatacgtgaaatacttcttcgccaagacgaagtctttgcttctaggccacgaaccctagctgccgtccaccttgcctatgggtgtgggtgtgttgccttggctcccttaggcccgcattggaaacgtatgagaagaatatgtatggagcat

SEQ ID NO: 2335 - DNA, 416 bp, Gossypium hirsutum
  Clone ID: LIB3493-002-P1-M1-G11
cgccactccatcgtcatcaacctcggtgatcagctcgaggtgatcaccaatggcaagtacaagagtgtggagcaccgagtcatagcccaaaccgatggaactcggatgtctttagcttcattctacaaccccggcagcgacgctgtcatctatccggcgccggcgttggtggagaaagaagctgaggaaaagaacaaacaggtttaccccaaatttgtgtttgaagactacatgaaactgtatgcaggactgaaattccaggccaaggaaccaaggtttgaagccatgaaagcgatggaagctactgctcccattgcaacagcttaaaataaaaatattataacttagcttttgactttgtggaaaggaaaaaaaaaaggaaaaaaaaggtgttccagtgttcctcctatattata

SEQ ID NO: 2336 - DNA, 404 bp, Gossypium hirsutum
  Clone ID: LIB3493-002-P1-M1-G12
cttagccagaggattttgctgtatattggaaacttctattgtattgctccatttgtatccattttttgctgtatatacccttgtattatcccccctccaaactaaggcatcttgtgactcgttgttcgccagtggaattgcgataattctctgcgcttgttcttccccaaataaagattggatttcctcttgtgtccagctcccgggatccatgcatcattccatatattgacaccctggccattcccaattctccagccaattctctcttccagtagtcattgggctccccagatgctacgctaggtaaacgaagggtaagaacctattcttgcactcagaaactccccttgcgggaagtactttgctttcattactcatgcaaataaacaatctggttgcgt

SEQ ID NO: 2337 - DNA, 407 bp, Gossypium hirsutum
  Clone ID: LIB3493-002-P1-M1-G2
cccacgcgtccggttcttggaatccctgaaagcagaaggtgaactgatagttgaagatgcgcagccaagggcaggccaggccagagtggctgcagctgcacctactgatcccatcactttgactgctgaggagaaactcaatgtcactttgaaaagagatggtgggataagtaactttgatgttcaagggactttgtctcttcaaattcttaaccaggaagatgcactcatccaagttcagactgaaactgggggtaatcctggcattcttttcaaaacgcatcccaacatgaacaaggagttattttccaatgaaaacattctaggattgaaggaccctaataggcctttccccactggttctgctggggatgcagctggtgttggtctcttgaaatggagaatgc

SEQ ID NO: 2338 - DNA, 413 bp, Gossypium hirsutum
  Clone ID: LIB3493-002-P1-M1-G3
caaagccagatggcagctcagcacaaccagaattttcagatgacaaaaagtccactgttgaaaatgacgataagaagaagatacaggacgagtatcttaaagcttattatgctgctttgtataagaaacaacaagaactagaagaagctgctaagaaacaacaagaattattggacattcctctagccactggtctttctgactcttccaatcgtcaagttggtatgaaagctaaacgtgatgacaatgagggagaagatgatattgattgggaagaagctcctgttgctggcaatacaactgagagttataaggtcaatgatttgaatgtggaagcagaagaatctggagatgatgaggatgatgtagattgggaggaaggctgaattaatggttcagcttcctgtgatgtg

SEQ ID NO: 2339 - DNA, 383 bp, Gossypium hirsutum
  Clone ID: LIB3493-002-P1-M1-G4
acgaaacaatccctctcagtcaccaaagcaaagtgcgtgaaatccttcatattcaaggcggccaatgcggcaaccaaatcggcgccaagttctgggaagttatatgtgcggaacacggcatagatccaacggggcgttacaatggagatttggatcttcaactcgagaggatcaatgtttactacaatgaatccaggtgtggtaggttcggtcctcgtgctgctcttatggatcttgagcctgggaccatggatagctgacgatcaggtcctgcgggaaatactttttcaccaagacgaagtctgtgctgctaggccacgaaccctaactgacgtgcatcttggctatggttgtgaagatgctgccttggctgacttaggccc

SEQ ID NO: 2340 - DNA, 418 bp, Gossypium hirsutum
  Clone ID: LIB3493-002-P1-M1-G5
gttaaaaggctcattattctctgtttcgtatttctcttaaaactctacaatggctaaaacctttgcttgctttgtcctattagctctcatagttagttgcgcacttggtcaggctcctagctcggccccaaccaagtcaccgccgtcttctaaccctactccggctcccaaggtttctccaaccatgtctccaaccactacaccaaccgcatctccgccgtcaacatccactcccccgtcttcagcccctgaatcttcaccaacttcctctcccaccacttctcccccagctcctcccgctggttctcccgctggttctcccgctggctctcccgctggctctcccgctagcgctgtttctcccacaaactccatcagcgatacaccaggcagctctcccacttctcctacgagtgca

SEQ ID NO: 2341 - DNA, 389 bp, Gossypium hirsutum
  Clone ID: LIB3493-002-P1-M1-G6
cccttaattaattgtctcttatggagctgttctcttttttgttgataattccaattttctatcttctcttcaaaatatggaattggattaatgacgtgagggaccaacaatgttacattttggattaccaatgctacaagcccagtgatgataggatggtggggactgagttcagcggggaattgataaagaggaacaagaatctcggactcaacgagtacaagttcttgctgaaagccattgtcagttcaggcatcggagaacaaacctacgccccaaggatcattttttccgggagagaagagagcccgaaactggaagatgggatcttggaaatggaagagttttttcacgatagcatcgagaaggtgttatcaagggcaggcata

SEQ ID NO: 2342 - DNA, 407 bp, Gossypium hirsutum
  Clone ID: LIB3493-002-P1-M1-G7
tggatccagcagccccgcaaaacgtgcatcgtcacagtctctcctctctctctttttcgctcgttcttttctcttctctaaaaaaaacccctaatttatttatttatttttaaacaaattttaaaaaaaagactgtattttacaactctcaaatttgtctgcaaagcctaaaatcagaaggcagtaatgttgggcgctttaaggagaaaagttgcgagcggacgctcatcagcttcgatattaggaaagtcattacaggcgattcggcctggtgtttcggcttctagagtttcttctaatgctggaaaagagatgctatcagttcaactgagagggatcgcccatgttcggaacttctctcatcttgttctgccctgatgttctgctggtttaataaaaacaagaga

SEQ ID NO: 2343 - DNA, 396 bp, Gossypium hirsutum
  Clone ID: LIB3493-002-P1-M1-G8
cccaattcgatgctcgtcaatatgatcagaaaatgagtgatttgctccaaacagacggagatgattttttcacttcttatgatgaagtttatgacagtttcgatgcaatgggacttcaagagaaccttctgaggggcatctatgcatatggttttgagaagccctcagcgattcagcaaagaggaattgttccattctgcaagggtcttgatgtgatacaacaggcacagtctgggaccggaaagactgcgactttttgctctggaattttgcagcaacttgattacggtatagtccaatgccaggctctggttttggcacccactagggagttggctcaacagatcgagaaggtgatgcgggcacttggtgattaccttggtgtgaaggtccacg

SEQ ID NO: 2344 - DNA, 409 bp, Gossypium hirsutum
  Clone ID: LIB3493-002-P1-M1-G9
accgattcaagctcttctcaaatcttttttcaatcaactctctccaaagatgcagatcttcgtcaaaacccttaccggcaagaccatcaccctcgaggttgagagttctgacaccatcgacaatgtgaagtctaaaattcaagacaaggaaggcatcccaccagaccagcagcgtctcatcttcgccggaaaacagctcgaggacggccgtaccttggccgattacaacatccagaaggaatctaccctccaccttgtcctccgtcttcgtgggggtatgcagatcttcgtcaaaaccttaaccggcaagaccatcaccctcgaagtcgagagctccgacaccatcgataatgtgaagtctaaaattcaagacaaggaaggcatcccaccagaccagcagcgtcttatc

SEQ ID NO: 2345 - DNA, 403 bp, Gossypium hirsutum
  unsure (1)..(403): unsure at all n locations; Clone ID: LIB3493-002-P1-M1-H1
ttccgctgctttagagttctggtctgctcaacactcttccttctctctaaatctaatactcagatccgcgagtaatttttgtcacagctcgttagaatggagacctttctattcacatctgaatcagtgaacgagggtcacccggacaagctctgcgaccagatctctgatgctgtgctggacgcttgccttgcccaggaccccgacagcaaggttgcctgtgaaacatgcaccaagaccaacatggtcatggtctttggagagattaccaccaaagccaatgtagactatgagaagattgtccgtgacacatgccgctctatcggatntgtttctgatgatgtgggtcttgatgctgacaactgcaaggtcctggtcaatattgagcaacagagccctgata

SEQ ID NO: 2346 - DNA, 412 bp, Gossypium hirsutum
  Clone ID: LIB3493-002-P1-M1-H10
cggacgcgtgggtgcaaagcttggggtcaagctaggcatgtggggaactgtcaggaagattgaccctggcttacgtgcatatcaaaccgaaagagcatcgggagcgcccctttctcattcagcttccatggctcaaataaacaccaaagtaactcaagactatctgacatccttggaaagcaatagtaatgattcatcagagcttgaaacacacaattcgtctgagaaaccagggaagaacaacattcccaaacttgtagttgttggtggggctatcgcggttgcatgtattctagatcgagggctcttaaccaaagctgttatattcggagtagctcgaaggtttgcaaaaatcggaagaaggttgtaatcctgaatatttttgtgggtcaatcgaaggaaaccgcaccca

SEQ ID NO: 2347 - DNA, 404 bp, Gossypium hirsutum
  Clone ID: LIB3493-002-P1-M1-H11
gcaaaatatcatgggcaagggtcctggtctctacactgaaatcggaaagaaagctagagatcttcttatcaaggagcctcgtagttgctaaagaggcactcagaccactagctctctcactggtgtttcaattacctatgccggaacgaagaaaggtgatcttttcttggctgatgttaataccgcaagggaccaaagccaccaaagaagggccaacccgaagatgcagtgtatgactttgaagacaagatcaactttgcagttatcccttaccttcacggtggtcctcacaatcaccagattggtgtcctggctgttgtcttgaaacagtccatgacaatttgcatgagtatgctgggattagctcaagcattggattgactgccaacccgattgttaacttc

SEQ ID NO: 2348 - DNA, 407 bp, Gossypium hirsutum
  unsure (1)..(407): unsure at all n locations; Clone ID: LIB3493-002-P1-M1-H12
tcgcgtatcgatctgtntcatcgatcaaatgctatccaaacccatcaatgcaaacaaccctccactcattccatccatatacccttgcttcataacgatctactaactaaggcatctcgagacttgatgttccacagaggaattgcgataatactatgcgcttgttttttcccaaataaagattgaatatggatgaccgacaagacatttacatgcactcatgatctgatacactgacaccctgtccatatccaatacatcagacaaaactctatcagagtaagcatgtgcgctccccatatgcaacgctagataaacaaacggtgagaacctaattttacactcagcaacactcttcgcggataggactttgctttcattactcatgcaaattaacaatttggttg

SEQ ID NO: 2349 - DNA, 412 bp, Gossypium hirsutum
  Clone ID: LIB3493-002-P1-M1-H2
cttgttctccccccttctccgtctttctggcaacatgggttcaccaccactttgggttctgcttctgggtgtgttgtttatggcttccggaacaatcgcagctccccctaagaagcctgtagatgtaccattctccagaaactatatgcctacttgggcttttgatcacattaagtatttcaatggtggctctgagattcagctccaccttgacaaatacactggtactggtttccagtccaaaggatcatacttgttcggacacttcagtatgcaaataaagctagtccctggagattctgctgggactgtcactgccttttatttgtcttctcaaaactcagagcatgatgagatagattttgagttcttgggcaacagaacagggcaaccatacattcttcagaccaat

SEQ ID NO: 2350 - DNA, 413 bp, Gossypium hirsutum
  Clone ID: LIB3493-002-P1-M1-H3
agaagaagaagaatccttgattcacaatttgattgtcactgtctttgcttcttcttcttcttcttcttcttcttcttcttcttcttcttcttttcaattgatgaattcaaggcaacaagttctttgagggtcagggacttgcctaaaaagtaaacatgccttttctttaatctgttttcttccatcatcttttccctcacttttgcctcttctgatattccatttttaaaaacttcccattccttgaaacaataaataaataaaaccttcattttttggtttctttctcgaatcttcaatgagatcttgagtggtatcccaaaatacttccaaatttttgaaattgggtcatcgaatttgagaccaaaatcttgtcaaaataaaaaataaacaataatcaaatatatataact

SEQ ID NO: 2351 - DNA, 418 bp, Gossypium hirsutum
  Clone ID: LIB3493-002-P1-M1-H4
gaagaatatgtggaaatcccaagtgacgttggcattacattcaatgttcaaccgaaaatgaaggcactggagattggtgaaaaggctagggatgcaattctgagccgcaaattcgaccaggtgcgtgtgaacattccgaatggtgatatggttggtcatactggagatatccaggctactgttgtggcatgcaaggccgctgatgaagctgtcaagatgatcattgatgccatagagcaagttggtggaatatatgttgtgaccgctgaccatggcaatgctgaggacatggtgaagaggaataagtccgggcaacctctttatgacaagagtggcaagctccaaatcctcacttcccacacttgtcagcctgtgcctattgcaatcggaggtccaggattggcagcaggcgttagat

SEQ ID NO: 2352 - DNA, 412 bp, Gossypium hirsutum
  unsure (1)..(412): unsure at all n locations; Clone ID: LIB3493-002-P1-M1-H5
gactgggattacgctaggttcagggccgttgctgacaagtgtggtgctctcttgttgtgtgatatggctcacattagtggccttgttgctgctcaggaggcaaacaatccttttgagttctgtgacattgtcacaaccaccacccacaagagcttgaggggtcctagggctggtatgattttctaccgcaagggaccaaagccaccaaagaagggccaacccgaagatgcagtgtatgactttgaagacaagatcaactttgcagttttcccttcccttcagggtggtcctcacaatcaccagattggtgccctggctgttgccttgaaacagtccatgacacctgngttcaaggcatatgctaaacaagtgaaggccaatgcagttgcccttggaaagtacctgatgggca

SEQ ID NO: 2353 - DNA, 427 bp, Gossypium hirsutum
  Clone ID: LIB3493-002-P1-M1-H6
ctacgcgtacggtctcccctatcgctctttttcatcgatcagatctcttcaaacccatcaattcaaacaaccctccactcattccatccatgacgcttggctcaggaggatccagtgttgcggtgcctcggaacttcagattgctggaggagcttgagcgtggagaaaaaggtattggagatggtactgtcagctatggaatggatgacggagatgacatttacatgcgctcttggactggcaccattattggtcctcataatactgtacatgaaggtcgaatctatcagctgaagctgttctgtgataaagattatccagagaagccaccaagcgtccgttttcattcaagaatcaacatgacttgtgttaaccacgaaactggagtggtggaaccaaagaagtttggacttcttgcaaattggca

SEQ ID NO: 2354 - DNA, 399 bp, Gossypium hirsutum
  Clone ID: LIB3493-002-P1-M1-H7
cggacgcgtgggtcaacggcgaatgaaaacgcggcttgtgctttgcttcggttgtcacaagtggaagaaaacaaggttgcaatcggacggtcaggagcgattccacttttggttaaccttctcgaaaacggtggaattcgcggcaaaaaagacgcatcaacggctctgtattcattatgcacggttaaagagaacaagatcaaggccgttgaagctggaatcatgaaaccgctagtggaattaatggcagatttcggttccaacatggttgacaaatcggctttcgttttgagcgtgctggtatcagtaccggaagccaaaacggcattagttgatgaaggagggattcccgttttggttgaaatcattgaagttggatcacaaagacaaaaggaaatc

SEQ ID NO: 2355 - DNA, 182 bp, Gossypium hirsutum
  Clone ID: LIB3493-004-P1-M1-A1
caagtttgttgtaaaccaagctagaaccagcagccaacatggcctcattagcagcctccaccgctgccgcctcccttggcgtctctgaaatgctcggtaaccctctgaatttcagtggtggagctaggtcatcggctccaacaccatccaactcatccattttcaagaccgttgctcttttc

SEQ ID NO: 2356 - DNA, 426 bp, Gossypium hirsutum
  Clone ID: LIB3493-004-P1-M1-A10
cttattatatataaaccctaagttaggtgcagggaaaagagcgatggcggcagttcccggacagttgatttgggaggtagtgaagaagaacaattgctttttggtgaggcagtttggaagaggaactgctagccttcagttcagcaaagaacccaacaatctctacaacctccactcctacaaacactctgggttggcaaacaagaaaacagtcaccattcaaagtgggggcaaagaccagtctgtgctgctagcaaccaccaagactaagaagcagaacaagccttcggccttgcttcacaagtccctcatgaaaaaggagttccccaggatggccaaggcggtcaaaaaccaggtgacagacaactactacaggccagatttaacaaaagcagcccttgcaagggtgagtgctgtgcacaggag

SEQ ID NO: 2357 - DNA, 406 bp, Gossypium hirsutum
  Clone ID: LIB3493-004-P1-M1-A11
caaaaaataaaaaaaaggaaaatcaagaaaatagaacacttgatcagatcagaaactgttcttagtttcccttttttttttttttttgcaagagctgctttgaattcgtaagtggacgccggagattggaagagaaagatgcgcttgatctgttccaagtttcatttccaactcttcccagaagattggtgcttggacggaatgggcagctgcactgcagagtatatggtggatagcaaatactagagaatctattaaggtttcctggctgaattatggcttctgcaagcctaggaaatggtggagcaggtagttcaaggtctgtcaacggtttcaaaagttcttctagttctgttgattggctggggagagaaatgcttgaaatgagattgagagacaaagtgga

SEQ ID NO: 2358 - DNA, 395 bp, Gossypium hirsutum
  Clone ID: LIB3493-004-P1-M1-A12
gtggtttcgttctaccatttcctcaaattccagaaatcccaagaattccagaaatcccacaaatcccacagatcccacaaatcccacaaattccactaatcccacagatcccacaagtcccacagatcccacaagtcccaaaaatcccactaatgccaggacagtcgggatgtgagagtggagagtgttgccgtcagggttgtggtgggacttgtgctgagtgtggtcagcccaggtgcgcatcaggatgttgccaggctgaaactgtaaagagcaaagggatagaagaggttatggacagtgaacccagtccaccaaagtagagagatgataccatattaagatgaaataacgaggaagagttggttgtcgtcttattaattatacaaaataag

SEQ ID NO: 2359 - DNA, 379 bp, Gossypium hirsutum
  Clone ID: LIB3493-004-P1-M1-A2
gggcaaccgcagattgtttcatctgatctgaaactccgtcgcccaattccccaaacaaagcaaatcgatggcgtctcctcctggaccatactccggcaccagcactctcgctctcgtggctcgtgcatctgctttctcttttggactcgtttatggtagcattaagctcaagtatctcaaggccaaggcaaggtctcaaaggaaagctgaagcaaaggctcaccactgaagcaggggtggtttttgttcatagttggtttgcatgagtgaattgagtttggtgtaggaataaagcatatcaatggtattgtaccagattttcatttcggcttaaagcttctacggacaatgacattcttgtccccaaattttttagtat

SEQ ID NO: 2360 - DNA, 486 bp, Gossypium hirsutum
  Clone ID: LIB3493-004-P1-M1-A3
aagattttctgcctcccagcatgtctgaatacagatatacattcaataatgtatttggattcttaaattttgcttcatgttcttcattgttttcgaccatggaaaacgggaagatagtcaaaggacttgcaggggttccagatgagggtccagtgttattagtaggtaaccatatgttactggggatggaccttagctctctgtgtgaagcattcttaagagaaaagaagatcctggtccgtggagtggcccatccggagttgttttggggaaattttcacacatcatccaatgtttttaattattttgatttaatgaaagtgatgggggcaatgcctgtctcaccaaaatcacttttgaaagctttatctacaaattcccatgttcttctttatcctgggggtgctcgtgaggccctccatcgtaagggcgaagcatacaaattattttggcctaatcaaccagaaattgtgagattcgcagcac

SEQ ID NO: 2361 - DNA, 397 bp, Gossypium hirsutum
  Clone ID: LIB3493-004-P1-M1-A4
tgaagtcaagaaacttcccctttacaagcacattgctaaccttgctggtaacagcaagttggttcttcctgtccctgctttcaatgtcatcaacggtggttcacatgcaggaaacaaattggctatgcaggagttcatgattcttcctgtaggagcatcatcctttaaggaggccatgaaaatgggtggtgaagtctatcaccatttgaagtctgtgattaagaagaagtatggtcaagatgcaaccaatgtcggtgatgaaggtggctttgctcctaatatccaagagaacaaggaaggacttgaattgttgaatacagccattgcttaagctggttacacttggcaagttgtattggaaatgatgttgcggtctgaatttatggacagataaact

SEQ ID NO: 2362 - DNA, 343 bp, Gossypium hirsutum
  Clone ID: LIB3493-004-P1-M1-A5
cggcgatttcgtggcgttaggaggtttgtttgaaccggcggctgatatttcggagctgacgtggcggcctgaatcactttccgccttgtagtgaaaattaaataaataaaaaacaaccgaaacggttcgttttggcttcgtatacatcacgtggacatattcgttttttttttggtggtaattacacaaatatacatgtggtctagatttagttttaagcctgaaatatcagttcttaatggtaataatacgacatttatttaaaaatcttccttctatttgtaatttaaacttaacactgttgattaaaattaatttctagtaataattagttttctcgctt

SEQ ID NO: 2363 - DNA, 379 bp, Gossypium hirsutum
  Clone ID: LIB3493-004-P1-M1-A6
cgaactttcaaaaaatttagggatcaatcaacctaaattctctcagtatccattttttggtgtttcggagaaaaagagaaaaaatcaaattacaaaatgaatatcttcaggtttgcaggtgatatgactcatttgatcagcatcttagtgctgctcctcaaaatctacgctaccaaatcttgctcaggtatttcgctgaagacgcaggagctatatgcgctagtatttttgacccgctacttggatctattcacggattttatatctgtgtacaacaccatcatgaagctggtctttattgccagctctctcgccattgtttggtgtatgagaatgcaccgagtcgtgaggcgtcctatgaaaggacctcgatacattc

SEQ ID NO: 2364 - DNA, 426 bp, Gossypium hirsutum
  Clone ID: LIB3493-004-P1-M1-A7
cggacgcgtgggctgaaattgtaaagactagaaagaacgaacagaacttttcgcttgaaacccggcaatggtttctttgtcgacttggtgtcgatacttggttcacaagatcgagtactccttcactctcggctggaagagttataagagagggcaaatcagtgaccgggaattacaagatgcagtttggaaaaatgtgtttcaaggaaaattgacttacttacactggagtaaaggagaggcaatggccccaactattggagaacaagggggtactcttcttgtacggaagattccatctgcagacccaggtcgagtttttgttggggatgtcattgtcatgaaggaccctgacgattctgataactatctggtcagaagaatggctgcacttgaggatatgaatgggttaaggataaaaagatg

SEQ ID NO: 2365 - DNA, 466 bp, Gossypium hirsutum
  Clone ID: LIB3493-004-P1-M1-A8
caaattattaacacattcacgccaacaaacaggccaatggattcccaaattttgaaacaataagctcagctaatctttctagagacgcttcacaaagcataaaaaattaaagattctaggattttccaacaccatttcgattgaagcaacaaaattaggggaaactgttcatcttctttaagaatgcaatggacaaaacttttgctacttcccattccttcatcttcgagcacgtttcaatctggagcttccagtaagctacggtttctctcaaccagtattgccgcaacctttgggatcccatacctcaaaaacacctattgtttttgccaaagaccttcgctggctaactggtgccccacttcattggccgatctgttcacatgcataaagggaatctcctttcaacctccggcttttgtaaatttaaatctaagcacatcctcaatgccaacacacaagccac

SEQ ID NO: 2366 - DNA, 222 bp, Gossypium hirsutum
  Clone ID: LIB3493-004-P1-M1-A9
tttaaaaagaaaaaaagagagatggcgtctgtaataaaatctgcaatcttaattctgtcggtgtttttatctgtacgcttcagttcgggtgttaggttgctccaggaacagcccaatgatgaccccaaaaacatggacgctattcctcccattgatgcactcaaccctaccgagttgaatggacccggtgttggcattcacgaagatcatgttgtcccaaaa

SEQ ID NO: 2367 - DNA, 457 bp, Gossypium hirsutum
  Clone ID: LIB3493-004-P1-M1-B1
cggacgcgtggtgaagcgtcgctctatagtgctggtctgatcaacactgtgccgggtctctaaatctaatactcagatccgcgagtaattattgtcacagctcattagaatggagacccctctattatcatacgattaagttactccacgtggggcaagctcactcttccttcaaacttttcaatttattcaatacgactattctcgatttcttatcacaacagctataatggatttttttacattcatcaagacttatttggttatggtttttgttgagatttccacctatttctttgcaaacttttttaagtatgtttactcacctcaatcccaccatgagtctgctctttttgccctccatttttatgcagtttatttctaattttttcttaatttttttgtacaatttttttttttttttttcaatcttcttgattcacattttaaatttttt

SEQ ID NO: 2368 - DNA, 433 bp, Gossypium hirsutum
  Clone ID: LIB3493-004-P1-M1-B10
cagacatggatgggaagacgaggctgccagtgtggttgaagacgtgaagaagaacccagaagcggccaccaatgggattgttttaaggaggagattgcagctcatgatgtacaataacatgtataggatcatgtttgataggaggtttgaaagtgaggatgatcctttgtttgttaagctcaaggctttaaatggagaaagaagtagattagcacaaagctttgagtacaactatggtgattttatccccattttgaggccattcttgagagggtatttgaagttatgcaaggaagtgaaggaaatcagattgcagcttttcagggaccatttccttgaggagaggaagaagcttgcaagcacaaaaagaactgacaacaatgctttgaaatgtgccattgatcacattcttgatgctcaacggaaggggaga

SEQ ID NO: 2369 - DNA, 459 bp, Gossypium hirsutum
  Clone ID: LIB3493-004-P1-M1-B11
gtttgactctttgccctagcctccttcagctctgtttctgtaaaagcgaaaccctagccactctctgctcaactcgccaatgggggcttataagtacgtgtcggagctatggaggaagaagcagtcggatgtgatgaggtttttacagagggtgaggtgctgggaataccgccagcatccatcaattgttagggtcaaccatcctactcgccctgacaaggcacgccgcttgggttataaggccaaacaaggttatgtggtttaccgtgtccgtgttaggaggggtggtcgcaagaggcctgttcccaagggtatcgtgtatggtaagcccacaaaccagggtgtcacccaattgaagttccagcgcagcaaacggtctgttgctgaggagcgtgctggccgaaagtttggaggtctcaaagttgttaactcgtactggatcaatgaggattctactta

SEQ ID NO: 2370 - DNA, 391 bp, Gossypium hirsutum
  Clone ID: LIB3493-004-P1-M1-B12
aaaccctctaaaacaacaaagcatctatctggattcttccttcatcattgcacttgaatgcttgttctttttttgctccattttttgttttagattctccatcgagttctaaactgtacttacggtggttaaaacttcttcgcttttcttgtttatatttccatctgtttgtttctcgggaaaaccgctacaattcccgttcgtttggtgctttttaattcgtgttcctttgttctgcctgttcgtttgcattcaaggatctttgaatcttcttgatctatcgtctaccattattttgagaacaatggaacactttcaaaacgacgatcttgaatatattgtcgatgactattacgacttcgatgattttgagcaacgacgatctcttcgc

SEQ ID NO: 2371 - DNA, 502 bp, Gossypium hirsutum
  unsure (1)..(502): unsure at all n locations; Clone ID: LIB3493-004-P1-M1-B2
cttgttttttgcaattttgaattccgcctgaaatttgtctctgcctcaatatttctctttcaaattcttattaggaaattttttccttttaaattcctataagtataattcttttgaagatctccttaaccctctgagaatctcccaaattttaactcttttgaatttttttgagatttctcaaagaacaaaaaagaactggaattgaaaagctggggtttttggctcctgtgtattctttcggttatgatttagccctgttagccttgagtatcacttctcattatgaacaaccaatatggtgaagatggagatgaagccactgttatggggtttgagtgccggatcacctgattaagttataataatgtgaccccgatatgaagacatgccgtgacccgcctgttgccctcctacctacatcgaccatgcttagctgccctgcaagcataaatgcttccnggagtcttccttttacccggcaatgtngatttaaaccatc

SEQ ID NO: 2372 - DNA, 499 bp, Gossypium hirsutum
  unsure (1)..(499): unsure at all n locations; Clone ID: LIB3493-004-P1-M1-B3
ctccttcaatgccatagctttggccttcttattagccattatctctggcgccgtcaatgcttgcccttcttccgaccgagaagcattgctagctttaagttcatcgttaaaggagccttatttaggcatcttcgattcatggaaaggcaccgattgttgttccaactggtacggtattagctgtgaccccaccactcaccgagtcaccgacgtttccctacgcggtgagtccgaagaccccattcttcaaaaaaccggccactcatcttccggttacatgaccggtaccattaacccttctatttgtcagctcgaccgggtcactactttaatcattgctgattggaaaggtatccgccggtgagatcccatcatgctttggcgtcgtgcccaactttgagaggtcctgatcttatcggaaattccttatcgggaaaaantcccagaccagatagggaccttcaaaagcttaccgtttgaacttaactgataataaaat

SEQ ID NO: 2373 - DNA, 391 bp, Gossypium hirsutum
  Clone ID: LIB3493-004-P1-M1-B4
cttgatattgacgtattattattttagcttttcaccgtatcaccaccattaagatgatgggtcctatggagatggcggtgggcggacaattggtgcttaattccttccttacaatccatctttgaaccatgttgctgcttaaaaggatgtttggagctggagagtggattgtggtgcttttttattttattttattttattatttaatattcaagggttttgagaacattaatgttaatagctattattgtacgagatttttttttgaaaaattagtgtcagtttgcggtcaaacttctatggaacttatatttaatacctggttttgtgaaaaaaaaaaaataaaaaaaaaaaaataaaaaaaaaaataaaaatatgtttttaaataaat

SEQ ID NO: 2374 - DNA, 389 bp, Gossypium hirsutum
  Clone ID: LIB3493-004-P1-M1-B5
ctcaagttcccatctttctttggctttcgcatcagctccatggatcgggcgcagctcctcctcgtaggattacctctcttcctcttcgccactgatctcctcagcctcttcactcctccgcccccaaagccgccgtcccatcaccatcaccatcaccaccatcatccccacctacccaaacctccactcaatcctgaaaccctagatatttctttacagaaacccagcgctagtggaggaatcggctatggcagcacggtgaatatcaatttctgcgcttcatgctcttacaggggaactgctgtgacaatgaagaagatgttagaagcccagtttcctggaattgatgtaatccttgataactatccaccatcattgcccgaacgttt

SEQ ID NO: 2375 - DNA, 386 bp, Gossypium hirsutum
  Clone ID: LIB3493-004-P1-M1-B6
caaggatttccttcgggccaaataaatggacaaaacaggagtgtacccattgtaagcaaggcgatgttctcagccggagatagtacagaacctgggaatctgctaaatgtcaatcatcatctcaacacaattcgtgctgaaaatacggttcgggtcaagtccgggagtgttgcagatgggaatccttccaatctatttgctgatcacttcggacaagaggatctcatgattgctcttctgaaacagcaacaaggcatcgcaccagccgaaaacgagttcgatttcgatgggtattccttggataatatcccagtgtaagtgatctcctatcgcactacaccattatatgatgtacataatatctcttctgaaatcaatgactggga

SEQ ID NO: 2376 - DNA, 451 bp, Gossypium hirsutum
  Clone ID: LIB3493-004-P1-M1-B7
cctctttcgagtttttttctctctctctttaatttcactcagatttttttccaccaccacccaccgacgattttccttcatccaatggaagccgccgccgacaatcagagcccttcttcatcggacgttgatgtcacgccacgtggggcaagctcagccgtccttcgagctcttcaattaatccaatacgacgattccgattccaagctacaagccgctaaggaaatccgtcggctcaccaaaacttcccaaaggtgtcgccggttacttgctgaagctgttatccctctcgtttctatgctccgagtcgactcacctcaatcccaccatgagtctgctcttctcgccctccttaatctcgccgttaaagacgaaaggaataagatgagtattgtggaagcaggtgctttagatcatgttattagattccttcaaagtgagaatataaacc

SEQ ID NO: 2377 - DNA, 550 bp, Gossypium hirsutum
  unsure (1)..(550): unsure at all n locations; Clone ID: LIB3493-004-P1-M1-B8
atttctctagagttgcatctggatatggtaaacagaacaacgaatttacgatgctaaaaggcgtcatgaaaactgaataccgtgttgccttacggtcttctctgcggaatgattttgctgaaggcgtccgtgcagtcttgattgacaaggatcagaatccgaagtggaaccctgccaccttagacgaagttgaccaaaaggaagtggaggcagtttttgaacctttaggtccgggaatcgaagagttgaaagtttaaggttcacacttccacataatcaagttcgctttccttgtcatttgcgaagatgaatgaaaggttcgtggttgtagaaatatgaactatgaagctaaagaaaaataaaagaacatttacaagcgcaactacctcagtttctggcatgaaggtatgttaacgtatntatatacctggatcatgacacttatggctttagtaatattgtcatgttaaagaacatccatgtttccttagatgttacacttttggactgccattgctataatcaaatctttatgttcaatcaggtttag

SEQ ID NO: 2378 - DNA, 479 bp, Gossypium hirsutum
  Clone ID: LIB3493-004-P1-M1-B9
ctattctcctcgttaagggttgtctggcattctcaatctctttccaaatgtactatttgggggctttggtttcgaagtaactgaacatggatatttcagctttcacgagcctcccaaactcatccaaagcaaaagcataaaacggaaactacgacatccacagttctttgtgtatctccttgtccttgcgctctgctgccaatacgctcaagagagaggaggaagattcatgtcattctcagcgactcttttatgtctcttgggattgtcaaatcgtgcaagtcgtttagatcaatgatattagtcttgtgaacggtggtgctgaaccatgattctcggaagtaactctctccgagaaacccactatgatgttctctttgttaaggaagatgcgagttatgaagaaattcgtgcgagttatcgtacagctatccttaattctcatcctgataagttgaattctgaccatgagactggag

SEQ ID NO: 2379 - DNA, 354 bp, Gossypium hirsutum
  unsure (1)..(354): unsure at all n locations; Clone ID: LIB3493-004-P1-M1-C1
cggacgcgtgggttgcaatcgaaaaccgaatcaaaatcttcgcaatctcatccagctacaaaaaagaaaaatggatctcagaatcatgggtttcgattctccgctcttgaatactctccaacatatgatggatctttctgacgatacggagaagatcccgaacgcaccatcaaaggtttacatgcgggatgccaaggccatggctgcaacaccagcggacattaaggagtaccccaagtcttatgtgttcatcgtcgacatgccggggctgaaatcaggggacatcaaggtccaagtggaggacgacaatatngctctgatcagcggagaaaggaagcgagaggaagagaaaga

SEQ ID NO: 2380 - DNA, 396 bp, Gossypium hirsutum
  unsure (1)..(396): unsure at all n locations; Clone ID: LIB3493-004-P1-M1-C11
ggtgaagatcttctcaagtgtttggagaaggaacttacaagtgatttcgagcgggctgtgctgctttttacgttggaccctgcagagcgagatgctcatctggctaatgaagctacaaagaagttcacatcaagcaattggattctcatggagatagcttgcagtaggtcttcgcatgaactactcaatgtgaaaaaggcgtatcatgctcgttataagaaatcccttgaagaagatgtcgctcaccacactaccggagagtactgcaaggctttggtccctcttgttagtgcattccgatatgagggaagaggggtgaacatgacattggcaaaatctgaggctaagatacttcatgataaaatctcggacangcattataaccgatgatgagat

SEQ ID NO: 2381 - DNA, 377 bp, Gossypium hirsutum
  Clone ID: LIB3493-004-P1-M1-C12
taatgatggcatgaatctgtcagcaccccaaaccttccgttccaaggagatctcaaagagcaatgttgttgatgacatggtttcaagcaatggaatcctctatgagcctggtgaacatcctgatcatgttgtggtcatcaagtatgtgccgtatgtgggagacagcaagagagccatggatgagtacacatcagagatattcatgggaggcaagaacaccattgtgttgcacaacacatgtgaggattccctgttggctgctcccattatcctagatttggttctccttgctgaacttagcaccaggatccagttcaaggctgatggagagggcaagttccacactttccatcctgtggctacaatcctcagttacc

SEQ ID NO: 2382 - DNA, 467 bp, Gossypium hirsutum
  Clone ID: LIB3493-004-P1-M1-C2
ctgggttttcactgaacaggctctccctgttgatctaattaagaggggaatggcagtgccggattcgagctgtccctatggactcaaattgatgataaacgattacccatacgccattgatggtttagaaatctgggccgccattgaaacctgggtaaccgagtactgttctttctactacccatcagatgaaacagttaaaaatgacactgaaatccaatcatggtggtcggaggtcaaaaacgaaggccacggcgatttaagaaaagaaccatggtggccggagatgaacacattagctgatctcacccaagcatgtaccatcatcatatggatagcttccgctttccacgcagctgtcaatttcggacaatacccatacgccggatacctcccaaacagaccaacagtcagcccgcggttcatgccggaaccaggcaccaaagaatacgacgagctcgaaaacg

SEQ ID NO: 2383 - DNA, 421 bp, Gossypium hirsutum
  Clone ID: LIB3493-004-P1-M1-C3
gcgatcgatgtatgcaaagggctgttgggcgacaaggctcttctgagcatatatgaccctcaagtcaatgaggagcagattcagagggatcttgcaatgaaaaagttcgattgggaccatccggttcatcttcagccgatgagccctacttcgatcaagcaagttaatgttgtctgggatgcctatgcagcaacgaaggatgctcatggggtttgcattctgacagagtgggatgagttcaaaaccctcgattaccagaggatttacgataatatgcggaagcctgcgttcatcttcgatggccgtaacgttgtagatgaagccaagctgagggcaatcgggtttattgtctactccattggcaagccaattgatcaatggctcaaggaccatgccactgtggcataagagcatcattttg

SEQ ID NO: 2384 - DNA, 319 bp, Gossypium hirsutum
  Clone ID: LIB3493-004-P1-M1-C4
gtgatctgttcttattcactccatttctttaacccatggctctttccgtcgagaaaaccgccgccggccgtgagtacaaggtcaaggacatgtctcaggctgacttcggtcgtctcgagatcgagttggccgaggtcgaaatgcccggtctcatggcttgccgagccgagttcggccctgcccaacctttcaagggagccaaaatcaccggttctcttcacatgaccatccagaccgccgtcctcatcgaaaccctcaccgccctcggagctgaaagtccgtggtgctcttgcaatatcttctctacccaagaccatgc

SEQ ID NO: 2385 - DNA, 348 bp, Gossypium hirsutum
  Clone ID: LIB3493-004-P1-M1-C5
ttcaagtatcacaagagaaccaaagatgtccgaacgggtaaatcagatggcaagacttatcgtttctccaatcaactactagccctcgaaactcatccttactttcagtccctcccagcaaccgcagccgtggcggcgcccacatcaccgcagcaagctgcagctcaggcgacaatgccagctccgagtctccctaatgttactgttccatcagcagcagccctccccagtttgcctcataacattgtaccaacaaatataaaccctacacccacactcccttcttttcctaatgtttcggcagatcacatgtcgaattcgacatcctcatcgacctcatcggatttg

SEQ ID NO: 2386 - DNA, 350 bp, Gossypium hirsutum
  Clone ID: LIB3493-004-P1-M1-C6
gtttactggaactggatccatcatcgccattgctggctacatcacttacatcgacttgatgaacaacatggggcattgcaacttcgagctcatccccaactgggtcttctccattttccctcctctcaagtacctaatgtacactccatcgtttcactcgctgcatcacacacagttcagaaccaactactcattattcatgccattctacgattatatctatgatacaatggataaatcttcggataccttgtacgaaaattcactcaaaagaaaagaggaaacgccccaacgtggtgcatctaacgcacttaaccacaccagaatccatctatcatctccgctttgga

SEQ ID NO: 2387 - DNA, 426 bp, Gossypium hirsutum
  Clone ID: LIB3493-004-P1-M1-C7
ccccccttatagggtttagtcaatttctgctctcttcctgtttttcattttcccttgtagagctaacgttctgctggtttcggttcactaattttttcagctgtgtttctttcaaatcgttttgatatgtttttcaaatcgttttgagattcatgtctccagttgtgagtgaaatcctccgatcggggtttatgataaattcctcactcagacgcaggacccatcttgttcaatctttctcagttgtcttcctccactggttctatgtttttcataaataaattctccgtaattgcttgactttcatttcctttacataataaacccaatatataagaaaactctgcattagctacacgtagttagtatctgggtcctgtcgcgtctttcttacagtgattttagtgtacatatataaacatggca

SEQ ID NO: 2388 - DNA, 536 bp, Gossypium hirsutum
  Clone ID: LIB3493-004-P1-M1-C8
cccaaaaccctctctcgccctctcatggctacctctaaccttattagggtttcttctccttcttactccacttcctcccctaaccacgctccttttaagcgcgtcggcactcacaatggaagcttccactgcgacgaggccctcggctgcttcatgattcgtctcactgacaagttctccaactccgagattatccgtacccgagatcccaaggtattggagggtcttgatgctgtgcttgatgttggaggcgtctatgatcctaatcatgaccggtatgatcatcaccagaagggatttgaggaggtttttggacatggatttaatacaaagcttagcagtgctggacttgtttataagcattttggcaaggagataatagctaaagagcttcagcttggagaagaaccacccgatgtgcatagattatttctggccatttacaaaagcttcatggagggcaatgatgcgattgacaatggaatcaaccagtttgatactgacaagccaccaaaatatgtgaacaatacacacat

SEQ ID NO: 2389 - DNA, 396 bp, Gossypium hirsutum
  Clone ID: LIB3493-004-P1-M1-C9
cggacatgtgatacaagagagcaataacatggatgatgcggctagaagaaacatagcggaccaaacagttatcaaagattgctgaactgaatccttgaagacagtgatggacatatgcctgagatgcctgtccgatgacccgaccggtcgaccttgcattgaagatgtcctatggaccttgcaattcgcggctcaacttcaggatccatggcgacatgattgtcaccacatacatgggatatctgactggcatccagatgactgacaagaacagatctgtcgtggatcaacctgctgatggctcttggaatctatagatggcagccatcactgatttgcaaactgcatatgaacaagttcaatactgctaatgactgcatcaatgactatttcatg

SEQ ID NO: 2390 - DNA, 459 bp, Gossypium hirsutum
  Clone ID: LIB3493-004-P1-M1-D1
ctcacctgaagatcgatactatcgaaggcgtgatcggtcctactcaccttatgatcgttattatcgtagacgggactgttcttactctcccgatgatagatactatagaaggcgtgataggttttactctcctgatgatcgttaccactgcagacgggatcgttcttactctcctgaggaccgatactatagaaggcgggaccgttactctcctgaggatcgacactatagaaggcgggaacgttcttactcacctgatgatcggtactatagaatttcacgtgataggtcatactcaccatatgactctagatatagaagacaccattatcgttctggcttctcgaagccttaaacctcccgatcaaggagagcttcgaggagaatgctgtcgtatagtgtcagctctaatacaagtaccggtttgaggaggagctgtcatgcagcacttcctcagta

SEQ ID NO: 2391 - DNA, 456 bp, Gossypium hirsutum
  Clone ID: LIB3493-004-P1-M1-D10
catgattactattctattgggacttatcatgagaagaatggtacatggattcctgatgaacctaagattgatgttggcattggactaaggtatgattatggtatatactatgctgccaagactttctacgatcagaacaaaaacagaagagttttgtggggatggattggagaatccgatagcgaagctgctgatatgcagaaaggatgggcatctgttcagagcatcccgaggacgattttgtttgacaagaagactggtactcatttgcttcagtggccagtggaagaaatagaaagtttgaggttgaagagttacgaatttaaccaggtgaaagtccaggccggatctgttgttcctctagatgttggtccagccacacagttggatatcatagcagagtttgagatagataacgaggcgttagagaaaacaacagggtccaatgtaacattc

SEQ ID NO: 2392 - DNA, 460 bp, Gossypium hirsutum
  Clone ID: LIB3493-004-P1-M1-D11
aagagtttcacctcaacaaaacacctacaaagcaaatatgcgcaattgagagctcttccactaatggcccaaccgtctgtgtcaccggtgccggtggcttcatcgcctcctggattgtcaagcttcttcttgaaaaaggttacactgtcaagggcactgtaaggaacccagacgatcccaagaattgtcatttgagagagcttgaaggagcaaaggagaggctatctcttcacaaagctgaccttcttgattaccaatctcttaaggaagccattagcggttgcgatggagttttccatactgcttcacctgtgactgatgatcctgaacaaatggtggagccggccgtgattgggactaagaatgtgataatggcagcggcagaggccaaagttcgacgtgtggtgttcacatcttccataggtgcagtgtacatggaccccaacaggagccctgatgt

SEQ ID NO: 2393 - DNA, 449 bp, Gossypium hirsutum
  Clone ID: LIB3493-004-P1-M1-D12
cggacgcgtgggcggacgcgtgggcggacgcgtgggtttttcaactttgaaaactagcatgtacgatccaagtggaagatctaataagatcatacttgttcttctacttgttttggtcctcatttctttgatagttcctttggaaaagagccctgaaactagtgaaacccaccattttcatgtcaataataatctccaaattgcatacacagcatgtgaaggcactttatatcccgacctttgtgtcgccactgtctccattctcccaaatcttgcttctagatcactccccgaccttatctcagcaattttaaaccaaaccatggacgaggtgagactctcttgtgccaactgcactgagattgaaaagggtctcaagagtaacaccaccttagaatgggccgccataaatgattgcatcgagctttttaaacataccctagccgagc

SEQ ID NO: 2394 - DNA, 441 bp, Gossypium hirsutum
  unsure (1)..(441): unsure at all n locations; Clone ID: LIB3493-004-P1-M1-D2
caaatacaactgccccgaaaagtacgatccccatgatatgcaagaacgataccaacgatgggtggcccgacatggccgaaagtacaagagcaagaacgaatgggcattgcggttcgggatatacaaatccaattctcagttcattgattgtgtcaattcacagaacctatcattcaagttgaccgataacgaattcgcagacatgacaaatgatgagttcagagctatgtatttgggttaccaaagcataagatctccatgtgagagcaacagcaaaggcttcgcatatgaaaaatatcacaatttgccaaaaagcatagattggagaaagaaaggtgtgtcgctccaatcaagaatcaaggccaatgntgggagtgttgggcattcttcagagtggcagccatagaaatgatcaatcaaattaaaacaggnaacttgaca

SEQ ID NO: 2395 - DNA, 440 bp, Gossypium hirsutum
  unsure (1)..(440): unsure at all n locations; Clone ID: LIB3493-004-P1-M1-D3
ggtttctccttcatccaggtaaaagtctttctcctttttctgttcttcattccttttccttctcccattcttcatcttctagtccgtcgcatatcttctcttctcaggctactgtttcgtttcctctctttctctctttctcaagcaaatctcattcctcttcgatgggttttggcttaagattcatcttcttgttgcggttctgcaagattctgttgttgtttcagaatgggtaagggcaacaaagaaaggacctccaatcaatttacgtggacaaaaccaatggaacatctttttcttgaaattctagcagagaaggcccagaaaggaaataagcctnttagtactttcaaagcaatttctattaatcgatttgtcaaagctatttctgaaagatttcaagtccaatacaatgtcgaaatatgtggaaaatcatttga

SEQ ID NO: 2396 - DNA, 349 bp, Gossypium hirsutum
  Clone ID: LIB3493-004-P1-M1-D4
cggacgcgtgggctggtgcaatagctggaggagttgcagcaggtgctgccttactgtttgctgctcctgcaattgcatttgcgtggtggcgtcggcggaaacctcaagaatttttctttgatgtacctgcggaagaggacccagaagttcatcttggacagctgaagaggttttcattacgagaactacaagttgccactgacagttttagccataaaaatattctgggtagaggtggatttggtaaggtttacaaaggaaggttagctgacggttcactggtggctgttaaaagattgaaagaagagcgtacacctggtggggagttacagtttcaaacagaagtaga

SEQ ID NO: 2397 - DNA, 247 bp, Gossypium hirsutum
  Clone ID: LIB3493-004-P1-M1-D5
cggccccgtggccaaagctttaatatcctaagctaatgtcggacgaggagcaccatttcgagtccaaggccgacgccggcgcctccaaaacctatcctaagcaggccggtactttccgtaaaaacggctcatcgtcatcaaaggccgtccttgcaggttgcgaagttccactccagactggaagccgacatgctaggtactttgtggatcgacatctcactgctaaaactgagatatcgtctcttcc

SEQ ID NO: 2398 - DNA, 475 bp, Gossypium hirsutum
  Clone ID: LIB3493-004-P1-M1-D6
cccgagggaacaaagggcggtcttcatctgtttctggggctggatatagaaatgagggagcaagggggcgcggaaactatggtggtggaaggggttatagccggggtgaatttggaaacaggagcagcaatagaggatattccaaccgtggaggtgatggatatcagaggggtgagcacatggggggtaatggtggccgtgtgagccgctctggtgaagcaacttttaatgcatcaacaaagaatgtggcaccaagggtatctgtccctgcttgaagaaagtaatccagaggggagtagtcaaacagtttgtttgtagtgtagtgatgtatcaaattgttgcgtagcatttagtggaaagaaccgactacttggcagaggagggcatctgagaattgttttagggttttttttaaacttccccttttgtccattttgtcattctataaatatataatagagagagatttttactg

SEQ ID NO: 2399 - DNA, 410 bp, Gossypium hirsutum
  unsure (1)..(410): unsure at all n locations; Clone ID: LIB3493-004-P1-M1-D7
cttttgcataataacatccccatcgtaaaacagcctcactctcagagttttttagaaaaaaaattaaaaagtcgtaagagaaatggcaaaattcccagtgatcaacttggagaaactgaatggtgagagagcagcaaccatggatctaatcaaagatgcctgcgagaattggggcttctttgaggtattgaaccatgggattccctatgattttatggacagagtggaaagcttgacgaaggagcattacaagaaatgcatggagcaaaggtttaaggaactggtggcaagcaaggcccttgagggtctccaggnctgggttactgatatggactggggaaagactttctatttgcgccatctccctgaatcaaacatggctgaaatcnccaatctaaccgatgaataca

SEQ ID NO: 2400 - DNA, 371 bp, Gossypium hirsutum
  Clone ID: LIB3493-004-P1-M1-D8
ggatgggttaatggccacccatgatgaggaaactgaacaattcttcaaggatactgatgtcaactgtgtcttatgccctcgtaatccagatgatggtggaagttgtgtgcaggaattacaaatatctacaatgttcactcatcaccagaagattgttgtagtggatgctgcaatgcctaatggagatccagagaaatggagaattgtgagctttgttggaggtattgatctttgtgatgggagatatgacacacctttgcattcactgttcaagaccttggacaccgctcaccatgatgatttccatcagccaaacttcactgatgctataatcaccaaaggtggaccaagggaaccttgtcacgatatcc

SEQ ID NO: 2401 - DNA, 503 bp, Gossypium hirsutum
  Clone ID: LIB3493-004-P1-M1-D9
gcggtaagaacccaacagtagtcatggtagcccaagctaacaacacaagcaacgacaactactcatcagtgccatttggcaccctatatgccattgatgatctcctcaagataggtcctggggacaactcagaggtgattgggaatgctctgggacttgggatcttggccggcaaaaattcaacgaccgtggtgatgtacttagattttggatttactaccggaaagtttaagggcagctctattagcatattttcaaggaatccgttaatagagacggaacgtgaagctttcggtggtgggagaagaggagaattcaggatggcagaagggcatgcacgactcaagaattactttttcgatggcaccactgttattattgaatataacgtgaccgtaattcattactaagaagacattctcttgtactgtgcaaaattaacatggtttgcagcacttgattagaaataatgtatgagaaaattagtaaattcatcatacttt

SEQ ID NO: 2402 - DNA, 369 bp, Gossypium hirsutum
  Clone ID: LIB3493-004-P1-M1-E1
cccaaagcaactatgaccaaaattataaaggaaatgttaccgccagatgtacgcgttgcaagagatactcaagatcttttgattgagtgctgtgtagagtttatcaatctcatttcatcagaatccaatgaagtttgtaacagagaggagaagcggactatagcacccgagcatgtactcaaggctctagaggttcttgggtttggagaatacattgaggaggtctacgctgcttatgagcaacacaagatcgagaccatgcatgactctttgaaaggaggcaaatggagcaacggagcagagatgactgaagaagaagcggcagctgagcagcaagaggagtttgctgaagcacgagcaagaatgaat

SEQ ID NO: 2403 - DNA, 432 bp, Gossypium hirsutum
  Clone ID: LIB3493-004-P1-M1-E10
ctttctgttcccaagcaaaagccattgtttcttcacaccttttgttttctaagtaccaacctaagtttcttctaatccgtaatctttttctttttcatggctttcctcaagtgggttttactgattttcactcttcattcgtttatgcctacacccatttcttcaaatctttcattaaccaaggaagccttagcgcaaatcccactcaactttctcgaattttccaagaaaccagattatggattggatggttaatattagaagaaaaatacatgaaaaccgggagcttggttatgaagaatttgagactagtaagcttatacgagctgagcttgatcttatgggcatcccttacaagtacccgattgcttgtacgggtgtgtcggctatattggcaccggcaagcctcctttgtcgactcagagcagatat

SEQ ID NO: 2404 - DNA, 438 bp, Gossypium hirsutum
  unsure (1)..(438): unsure at all n locations; Clone ID: LIB3493-004-P1-M1-E11
attcaacaatggcaccaacaataatattaatccaaggaaaagagcaagggaagttacggaaggggcggcaataactacgcccatgaattcatattctttgcaaatgcaaccgcctcagctgatagagctttcccaactccaccaaccgaatgtggttttcaccggcctccaattatctttcggcggcgaccaacaacaatatcagaatcagaatcttcaaaaacaacaacaccaacaacaacaacggcaacagaatcttgttcccagctccactctttttttgtccgtggtatccgatgaattggctacccaaatcaaacgccagagagaagaattggaccaatttcttcaagcccagggaaaggaattacggcnaacgttagcggagaaaaggaataggcactaccatgcgctgttgtgcggagtggaggaatcggt

SEQ ID NO: 2405 - DNA, 426 bp, Gossypium hirsutum
  unsure (1)..(426): unsure at all n locations; Clone ID: LIB3493-004-P1-M1-E12
caaagatatcactgcaagaaaaaaaaaaaaaaaaaaccagacatggcttccaacactgttgcatccgctgctcttcttcttaccttgaacttgttgttcttcactttggttagctctacctacgtgccttgcccaccaccaccaaagagccacaagcctacccacaagagcccaccctcggcacctgaacagccaggcacttgccccagagatgcactgaaactaggcgtttgtgctgatttgttgggctcagtgcgcgttgttgttggaccgtcgaggaccaaatgctgctctctcatttcgggtttggctgatctcgatgctgctgtttgcctttgcactgctattaaagctaatgtgtntgggggttaacctaacgttcctgtttcattgtctttgctcctcaattcctgcgaaaagcaaatg

SEQ ID NO: 2406 - DNA, 487 bp, Gossypium hirsutum
  unsure (1)..(487): unsure at all n locations; Clone ID: LIB3493-004-P1-M1-E2
aaaaatggagttttggggagttttaatttctggggttttagtttcttggtgggttttgagtgtaaatggtgctaatttaccaccatgtcaattccctgctatttacaactttggtgactcaaactcagacactggtgggatttcagctgcttttgaacccattagagctccatatggtgtgccctattttcacaaaccatctggtagagactctgatggtcgcctcatcattgacttcatagctgagagacttaagttgccatatcttcatgcatatttgaattccttgggagcaaatttcaggcatggagcaaatttcgctactggtggatcaaccataagaagaccgaatgaaaccatntatgaatattgggatagtccatttggtttagatatgcagattatacaattcgaacagttcaaggcaagggctacttgaatgataatcaaggttagatttttcatgttatctgttgataaaatgtta

SEQ ID NO: 2407 - DNA, 477 bp, Gossypium hirsutum
  unsure (1)..(477): unsure at all n locations; Clone ID: LIB3493-004-P1-M1-E3
aaaaaaaattacgatcgaactgaaaaagaaaagaacacagaaaggaatgagatcttggaattcatcagttgttttgttcttcttttccttgcctttcctccttcccctctctgccttagcttcttcaattcatgaccaacatgaaagaatcgggcacagagttttgatgagcttcaaagaaatttcgaaagaacctaacaatactttcgattgctctccctctggaccttgtgttccttgcctttactctgagaagagtgaccaaaaatatcgatgtagtgagactggctatcgtatccctttcaaatgtgtagaaactgatgatggttcaaaggccgaaaataaacaaaaaacagaaaagggtaggtctaatcttgaaatctcagttatcaatgangaattaagacaacgaagaagcttacttgatgattcatcgacatcggagagtggtcacgagcttatatcacctataggagc

SEQ ID NO: 2408 - DNA, 466 bp, Gossypium hirsutum
  unsure (1)..(466): unsure at all n locations; Clone ID: LIB3493-004-P1-M1-E4
ctagaatttgaatctgaagaacatgatagaaatgatgaggaagatgaagaagatgatgatggtggttatgggagtgagaacggngaagagggaagtcctaaaaatttggattcggaggttgtcgccgaaaataccgaggttaagaatgtgaagttacccaatctaacggttaaggaaaagaaagagctggcttcttacgcttatggtttagggaagaaattgaagtgtcaactggtgggcaaatctggtgttactgataatgtcattttctcttttcttgagactcttgaagccaatgagcttctgaagatcaaaattcaccggacctgtcctggagagctagaggatgtggtgagccaacttgagcaagcaacccggtcactcgtcgttggacaaattggtcggactgtgatcatatacaaagcctagtctcaccaaaatgaaggctgaagagaaaaagaaagag

SEQ ID NO: 2409 - DNA, 317 bp, Gossypium hirsutum
  Clone ID: LIB3493-004-P1-M1-E5
ctgagtcatatgcccgtatagagaagaggccgataaggcggtcaatgcttgtaacattatgaagactatgcctggggcatctagtccattgcaagtggaggatgcatatggcgagttggaaagattagagcgcaaactctgtgatggcttgctatcgaagaatgtctatgaagatgacgatgctgcttaattttctaaatacggaaccatgagggagctgcatattactttaggctcgtaacagacatgtaaaggctgtgccttgttgaaatatgggactaaggagcaggcccttgtcgcgctgcatgctgataatg

SEQ ID NO: 2410 - DNA, 435 bp, Gossypium hirsutum
  Clone ID: LIB3493-004-P1-M1-E6
ctttagtcttacccttggaaaggttcctacagttggtgttgtttacaatccaataatggatgagctctttaccggtatacttgggaaaggtgcttttctcaatggatctcctattagagtgtcatctcaaacagaacttgtgaagtctctgcttgcaacagaggctggaacaaaacgagacacaccaactgtggatgctactacaaatagaatcaataacttacttttcaaggtgagatcagtccggatgagcggttcatgtgcattgaatctttgtggaattgcatgcggaaggcttgacctgttttatgaacttggatacggggtccatgggatgtcgcaactgggttttaatcgtaaagaagctggggcctcgtgtatgatccgtttggaaagattcgacatcacagtccacaggtcgcgttcgaatcgtct

SEQ ID NO: 2411 - DNA, 429 bp, Gossypium hirsutum
  Clone ID: LIB3493-004-P1-M1-E7
ggaggcttcctgaggttctagttattcatctaaaaagattctcatatagccggtcaatgaagcataaagtagaaacttttgtcaactttcctattcatgattttgacttaacaaattatgtagctgacaagaggagttcctgttctcagctctacgaactctacgccttgaccaaccattatggtggcatgggcagtggccactataccgcgcacatcaaacttctagatgagaataagtggtacaactttgatgacagccatatatcacctataaatgaagaagatgtaaagtcagctgctgcatatgtcctgttttatcgaagggcaaagtccgatacctcaggtaccagttctgcagggtctcgtagagctcgggataaaacatcttataagtaattgaagtgaaggtacatgcctaaactatttg

SEQ ID NO: 2412 - DNA, 407 bp, Gossypium hirsutum
  Clone ID: LIB3493-004-P1-M1-E8
gcgattaaaaatggcatttccgtttcgtgctctgctggtaattcaggtccttcgagttcaaccgtttctaataccgcgccatggattatgaccgtgggtgctagctacctcgatcggagcttcgaagctattgtcgagcttggagacagacaaattttcgagggttcatcgttatatatcggcaaaccattaaagcaattacccctgttttatggtgatctaagagccgcattttgtattgatggctcactcaagaaaaaccttgtgaaaggcaaaatcgtaatttgccaaaggggaattacgagtcgagccgagaaaggggaagtagtaaaatcggccggaggtgccggaatgttacttataaactcagtaaacgaaggtgaagaacttttcgctgacgcacacgt

SEQ ID NO: 2413 - DNA, 485 bp, Gossypium hirsutum
  unsure (1)..(485): unsure at all n locations; Clone ID: LIB3493-004-P1-M1-E9
gtgcctcaagtcatggggtgggctttgttgcagatattcgacgaatgaatgttgctcttactcgtgctagaagggctttgtgggttatgggtaatgccagtgctctggtgcaatcagatgactgggcagccttaattgctgatgccaaagctaggaattgttatatggacatggattctctccccaaggacttcacaaaagacttgctccccaaagaattttcagggccaaggggactttactctccatcacagggtaaggcttctaatatgagaggtttaaggtctgctggaccaagacatagatcacttgatatgcacatggaatccaggtcaggaacaccatcagaggatgaagataagtcaggcacaactgtaatttctaggaatgggaattatcggccatttaagtcgccactggatactnttttggatgattntcatccgtcaggtgacaaatctagagaggcctggcaatatggtata

SEQ ID NO: 2414 - DNA, 439 bp, Gossypium hirsutum
  Clone ID: LIB3493-004-P1-M1-F10
gagagacccaacttatattgatctggaggctaaccctcctgtaggaaaagatcaacctcctgatctagcttctttagttccattgggttccacagttctgcctgatcttcccgagaaaaccccttcacaagattcatctggaaatcatcctagtgctggtaataattctacagcagttacagcaaaagctgataagccatctagtgctgtgcaaaatgttaaggagaaatctgtcaatggtgttcgaccatcgattccttccacagatgctgggaagtttgtggaagagcttctggatagaacatctaccttactgctatcagaaatttccgaagattccatcaagcgacatggtggacaattaggagcctgagtagcgaataatattagaaaatgtcttaaaagagatctaaagaatctcgctacaatagtcaagaac

SEQ ID NO: 2415 - DNA, 446 bp, Gossypium hirsutum
  unsure (1)..(446): unsure at all n locations; Clone ID: LIB3493-004-P1-M1-F11
catcacttttcaactctcaaaccttcaagtctcatttctttctctttctctttctctcactagagaatccaagtttctgtttggccaaagagaaaataattaatgatggtgggaaaagatcaagatctgggtttaagtctaagcttgagttattctcaaaatcatcattcgcttcagttaaatctaggcccatctctcgttccatcttctgctaatcaatgctactctccttctgatccaaacatggaatctttacgggcagagactagatcatttcttaaagggatcgacgttaacaggctgccatccacggtcgattgtgaagaagaagccggagtttcatctccgaacagcaccatatcgagtagcctgagtgggaaaaggagcgaaagagaaggtaataacaatggcgacgagcntcagatcgaaagagcttcttctcatgg

SEQ ID NO: 2416 - DNA, 395 bp, Gossypium hirsutum
  Clone ID: LIB3493-004-P1-M1-F12
ctgaaactctgatcgatcaacgagtttagggttttagcttcgcaaagcttcttcttctatctcgtctcgcttataccttggaacactaaagcaaaaaacaagcgaatatggaagctggagatggaggcgttgaccgagtcgatgactcaaaggatttacaacaacaaagcaaagccttcgataaactcactgaccgtgtcgaagatcgacagcttgattcttgtcgtgcccaatcggacatggcatcgattgcagcctcagctgaagcagaaaagaatgctatgagattgagagagaaagaattagctgctgttaaaatcaacgcggctgaagttgacatcattgcgaatgaattagagttggacaaaatggtggtgagagaacactccggagca

SEQ ID NO: 2417 - DNA, 419 bp, Gossypium hirsutum
  unsure (1)..(419): unsure at all n locations; Clone ID: LIB3493-004-P1-M1-F2
gcaaatgcagcctggtatgaaagctgtttgaagtttgaagtaagaaaaagagttgaacttgtgctgtaattctgtgtgtgcagaaaggatattcaattttgtttctttagctctgcatttggaatttgagggaaatatcaaaacattccttgaagcacccttcaatcccaagttgagagatggggatggatggtgnagaagagcaaatgcaagagccagcaggctgcaaggaaagaattttcgtttcggttcgtttacgccctctcaattacaaggaaatagctaggcacgatgtatcagactgggaatgcatcaatgataacacaatcatataccggaacagccctttcggttccgagagatcaatgtacccaacttgctatacttttgaaccgatttttagccctgattgccccaac

SEQ ID NO: 2418 - DNA, 273 bp, Gossypium hirsutum
  Clone ID: LIB3493-004-P1-M1-F3
caacattcacttaggaggaagcgaagaacaaaatgagaggattaatgaacaagctagtgtcccgctctctctctgtcgccggcaaatggcagcaacagcagctccgccgtctcaacattcacgaatatcagggtgctgacttgatgaacaaatatggaattaacgtgccgaaaggaagtgcggtttcttccatcgatgaagttaaagaagcagtcaaatctgccttccccaatgaaaatgagttggtggttaaaagtcaaattttggctggtg

SEQ ID NO: 2419 - DNA, 434 bp, Gossypium hirsutum
  unsure (1)..(434): unsure at all n locations; Clone ID: LIB3493-004-P1-M1-F4
tttctccttacttttttttctcattctaaatattttattagatccaattggaatcgaagattaaaactctattgctaaattttctttcactcaattctatcttattttaaattaatttttagtgttggttggattttgtgggatttgaattagttagatctgaattggggtattttaaatttctttttcctcgattggttagggagtttttctcaatggcaatgccatcgggaaatgtagttttatctgataaaatgcagtttgctgctcctccagctgcaggagctggcggcggcggaggtggagctgcntggagggtggatccaccagcaccatcctcggcaatggttccccgatgagcgtgatggcttcatctattggttgcgaggggaattcgctgccgccaatgctatgaatgactctctttgtcaaca

SEQ ID NO: 2420 - DNA, 421 bp, Gossypium hirsutum
  unsure (1)..(421): unsure at all n locations; Clone ID: LIB3493-004-P1-M1-F5
cgtagcgtcagcagtctaatcaaggtcggacgaaccgagcccgtcatggtcctacgtgtcgacaaggaaaagggttacatcgatttgagtaagaggagagttagcgaggaagatattcaagcttgtgaagaaaggtataataagagtaaacttgttcactctatcatgcgacatgttgccgagactttggatatcgatttggaggaattgtacattaaaattggttggcctctataccggaaatatggtcatgcttttgaggctttcaaaatcattgtgaccgatcctgattctgtcttgaacaccctcacctgtgaagtaaaaaacccggccctgatgggccaaaggtgactgaagtggttcctgtgtgacggnatgagtcaaagatgccttggtgaaaaacattaggagaagaatgccc

SEQ ID NO: 2421 - DNA, 441 bp, Gossypium hirsutum
  unsure (1)..(441): unsure at all n locations; Clone ID: LIB3493-004-P1-M1-F6
aaaagaatggcaatttggaatctcctatggctttacatattaattctttatgttagcaatggcagaatggaagcgtctcacaaggtttatccacaatttcagtctttaagtgcagttaacatccgccaactccatcatactgcctttcactttcagcctcccaaaaattggatcaatgatccaaacggtcctatgtactataatggaatataccatattttctatcaatacaatcccaaaggtgctgtgtggggtaacattgtttggggccattcaatttcaaagggattgatcaattggaaagaacttgagcctgcaatttgtccttcaaaacattttgatatcgatggtgcttggtctggtcaaccaccattcttcctagcaataagccaatcattntatataccccgagttgattccaatggcatccaaacccaaaac

SEQ ID NO: 2422 - DNA, 376 bp, Gossypium hirsutum
  Clone ID: LIB3493-004-P1-M1-F7
aaccccccttaaaacccttgaaatcatggcctttgcagagtcccaaaaccccttacgagtttatagaatcccgcagtccaggtacatcgacgccgtccgctggctttcaccggtttctccctccgacagattcgcagccatcgcctatttcgacgctgataccaactctccctccatcgaaatcgcatacgttgacccaaacccacaaagctcgtctccaaccttaacccctcaatcttcatggacctcaccttctcgcatttcgtccctcagaaccgcccactctacccctcagcccctgctcgctgccgccactttctccggttcacttcacattttggcctctgatttaatcaatggaggggtgatggaatct

SEQ ID NO: 2423 - DNA, 381 bp, Gossypium hirsutum
  Clone ID: LIB3493-004-P1-M1-F8
cccacgcgtccgtagaaatgtgtttgactctggatattttcatcatttcaggcaagaatgattgatttttattacggtctgattatggttttagtccctctgttatcatttgattttaatttagtataatttggtttctttaagtttataatattgacgtgaattttaaaaaaaatggaactatactatatgcggtcacaaaacttatggaggatagttatactttttgctttcattaatgaatagctttcttgtctttatctgcccttatcaaataagattttattagttaaaggatgtttcctggatcaaccttcaattgatactgtaagcaattttcttatgtaattctaatatagaatgtatcttgttttaatagat

SEQ ID NO: 2424 - DNA, 399 bp, Gossypium hirsutum
  Clone ID: LIB3493-004-P1-M1-F9
aaccgatttactacccttttgcctttgttccatcgatttctagagcttcatggctgaaaccgcctctaactccgccccttctacctctaccaccgccgaggcgccagcgcctcaagaaaccaaaaagaccaccgaggcaccagtaagatgggccgatatggaagacgaagcttcggaagagccgagcacttcatcggaagacaaaggtgcgccggaactcggagttgaaaacctaaaaatcgatgaaagcaaaaagataaacaagttcctcgacgaacccgaggactccaacatcaaagccgtcacatctggggagacaccatacacttcagcatttacgtttgaggaattgaatctgtcccctgaattgtaaaagggctatatgttgagatgaaattt

SEQ ID NO: 2425 - DNA, 489 bp, Gossypium hirsutum
  Clone ID: LIB3493-004-P1-M1-G1
gccgccgatatactgcataaaaacgtggtggcgcataacaatgatacggtgcggaaaggtgtagcggattgggagaagcagccgaggttgttcccgttgggtaacgctgacggtgcatcaatcaccatggggagctctcccagattcccaatgtacaataatgattttgggtgggggcgacctttggcggtgaggagtggtagggccaacaagtttgatgggaagatctcagcctttcctgggagagatgggaacgggagcgttgattttgaggtgttttggcccctgacaccatgttgggggttgagaatgaccctgagattatgcagtacgtatccgaattccttggagtgcaatcagtagggaaaagaaacataaattccaggtggcaatttgtgaatgggtggataagtgtaaacctttaccaaatcttggaggaagaaaataccaccataaacttcaacccgctggatttcatttctgtaactc

SEQ ID NO: 2426 - DNA, 437 bp, Gossypium hirsutum
  Clone ID: LIB3493-004-P1-M1-G10
cggacgcgtgggcggacgcgtgggtttcgaagagaatgcattatggaaaatttgtggcagaatgtaaataccaggcatctccggatgcttatcgagctgcaattagagaacaggaagggattggctgatgaagttgctcacatatccgtctgtggaagaagcgatcaagaaaagagtagaaatgaaagccagagcttacggacaagtagtgccggataatatgaacatgaaggatgctgatccggtttacaaaataaacccaagcttggtagccgacttgtacggggactggatcatgccattgacgaaggaagtccaagtggagtacctgttgagaaggttagacggacccgaatgaataatgtaagctgtttatgatgaaacagagataaaaagtcacaagggatcaacttttcattagcttgtttggtgatgtt

SEQ ID NO: 2427 - DNA, 404 bp, Gossypium hirsutum
  Clone ID: LIB3493-004-P1-M1-G11
cggacgcgtgggtgccacttgataaaattttccgcataaattcaaatctttattctttttcaagatccgatagaagaacccctggtgatccgaaatggcggcgtatagagcagatgatgactacgactatttgttcaagctagtattgatcggagattcgggggttgggaaatcgaacttgttgtcgagattcacgaaaaacgagtttaatctggagtcaaaatccacaatcggagtagaatttgctacccgaagtattcgggtcgatgataaggtcgttaaggcccagatttgggacaccgctggacaagaaagataccgggcgattacaagtgcgtactaccgagggagctgtcgggcattgcttgtctatgatgtcactcgacacatcacatttgagaatg

SEQ ID NO: 2428 - DNA, 407 bp, Gossypium hirsutum
  Clone ID: LIB3493-004-P1-M1-G12
gaaatttaaaaattaaaatactttttaaaatataaatattcaatccctcgagtatttttttattttcttttttctgcgacgataaaaaagccacggttactttccatccacagtcgacgggctgactttgcggcggcccatggcgatcgtcgaccggcatcagcggagctccgaaagaaagatgtttagtctttgtcccttttggcagacttcgaccacgatgaacaactcttcctcttcttcttccactaaaaatctcaaccacaatggcagtcgacactcggagacggttgccgccaagcgctctaaatccgtctcatccattgctagatcgcttctccctccacggcgccggctgcgccctgatccttctaataaactctatttcccttatgagcctggaactc

SEQ ID NO: 2429 - DNA, 362 bp, Gossypium hirsutum
  unsure (1)..(362): unsure at all n locations; Clone ID: LIB3493-004-P1-M1-G2
cccacgcgtccgcttttactttgctaagtccaagctttcgacaatggccgaaccctctaccatttcaccagctcccctcttgaaagatgagctcgacatagtcattccaaccattcggaacttggactttttggagatgtggaggccctttttccagccttaccatctcatcattgttcaagatggcgatccttccaaaaccatcaaggttccggagggcttcgactatgagctttacaataggaacgatatcaacaggattntgggtcctaagtcttcttgtatctctttcaaggattctgcttgtcgctgctttggttacatggtttcaagaagaagtacatttatacccatgatgatga

SEQ ID NO: 2430 - DNA, 450 bp, Gossypium hirsutum
  Clone ID: LIB3493-004-P1-M1-G3
gttctcttctaggactacaattggcagaaagagatatcatagtagcatgtgttgattacaggaactttccccagggaaccattagtgatatggtgaaagatgtatctcaagggatctcatttgtctgcaatctcattgacagatttggaggtgatcctaatagaatctatttaatggggcagtcagcgggagcacatatttctgcttgtgttcttttggagcaagcaatcaaagaatctagaggagaaagcactacctggagtgtctcccaaataaaagcttattttggcttatctggagggtacaatttatttaatttggtcaaccattttcacaatcgaggcctttatcgttccatctttttaagcatcatggaaggggaagaatcctttgaacaattttcttcctgagttagaataaaagaccacgcaattgagaagctgcttcttt

SEQ ID NO: 2431 - DNA, 350 bp, Gossypium hirsutum
  unsure (1)..(350): unsure at all n locations; Clone ID: LIB3493-004-P1-M1-G4
tttaactccaaagtccaaactccactagcaacaagaagatggagagtggagcaaagaaatggggtttccaagggaagcagggcctggaggcagcgtccaccaccaccgtccgaggatatctcaacctattaatgggcaacatcaaccaagataattgccttacagtcgttcctctcggtcatggcgacccctctcattttccaagcttcaggattacccctgctgctgaagatgccatcgttgatgctctacgttcggctaagcataattgttattcgaccactgttggtattcttcccgcaagaagggcactngcagattacctcaaccgtgaccttccctaccactta

SEQ ID NO: 2432 - DNA, 373 bp, Gossypium hirsutum
  Clone ID: LIB3493-004-P1-M1-G5
aacaaattactctttttattaaaaggaaagaaggaggaggaggaaatggatggaaaaagaatcgagggcaatgaagtttatgctctagcaatgtgtgtaagtattctcctctttgctccgattgttgtgtcacaaccaataccggcagataaatcccaagtggaagcttggtttaatggcattatcaagccggtgaaggaaaggggtacaaccttagaccctgaattggttcaagccgagacagaacctagaatcataaaggtgatgcaagggtgggggtgagaattcgataccataaccaaagccatcgagagcgtccatcagggaacgccaaacgcgtgttatatcatcggacctgatttacaagagaaat

SEQ ID NO: 2433 - DNA, 333 bp, Gossypium hirsutum
  unsure (1)..(333): unsure at all n locations; Clone ID: LIB3493-004-P1-M1-G6
cggacgcgtgggcagctatcaaccttcaatcaatcatggtgtttgagaaagatcttaaccttgatgcaacggagctccgattaggcctaccaggctcatcggaggagtctcttaggatcagtaacaaaagagccttgcctgatatgaatgatgattctggtgtcgcagctgctaaaaaatgtgaccaagaaactgctccacccaccaaggcacaagttgtagggtggccaccgatccgatcatacagaaaaaacagccttcaaacaaagaaaactgaggctganacaagtggaatgtatgtcaaagttagcatggatggagctccttatctta

SEQ ID NO: 2434 - DNA, 405 bp, Gossypium hirsutum
  Clone ID: LIB3493-004-P1-M1-G7
tgcagtgcttgacgcctgcctcgctcaggaccctgacagcaaggttgcctgtgaaacatgcaccaagactaacatggtcatggtgtttggagagattaccaccaaggccaatgtagactacgagaagattgtccgtgacacatgccgctccattggatttgtttctgatgatgtgggtcttgatgctgataactgcaaggtccttgttaatattgagcagcagagtcctgatattgcccagggtgtccatggccactttacaaagcgtcccgaagagattggagccggtgaccagggccacatgtttggttatgctactaatgagacccctgaacttatgcccctaagccatgtcctcgcaactaagcttgggggtcgtcttacctgggttaggaagaatgggac

SEQ ID NO: 2435 - DNA, 302 bp, Gossypium hirsutum
  Clone ID: LIB3493-004-P1-M1-G8
cggacgcgtgggcatggataaacagaaaaggaagcttggaggttgatcaattcaagcacactggttgtttctctcaactgtaattttttttttttttgttcttttgcctagctagttgatgaaggagagcatcatcccacattatattcccatttcccatccactttgatttttcattttgttttgttttttcttgattatggtttactaccctttttaactatttgaatagttcaatatataatgtggagaaaaatcagaattagaaattattactaaatggagagaaatatgttaattgg

SEQ ID NO: 2436 - DNA, 436 bp, Gossypium hirsutum
  Clone ID: LIB3493-004-P1-M1-G9
atttggcacaaccaattattggatttcttttttcttttttcttttttttttttataaatacaataacttcttgatccaaaaggtcacaacttgaagggcgaaagaagaaaaaatcgaaaatggagaaagatgaatcgttggcaactgtagcacccaaagcaccagtaactagtgaaagaaagattctagataacttggacgaaaaattaccaaagccctatttggcaagagcactggtagcacctgacgtggaacatccaaaaggaacggaaggacgtgtgaacaatggaatgagtgtacttcaacagcatgttgccttctttgatcgagataacgatggaattatttatccctgggacacttacaatggtttgcgagatattggtttcggtccaatatcctcttttatttttagagtctaatcaatggagcaatg

SEQ ID NO: 2437 - DNA, 337 bp, Gossypium hirsutum
  Clone ID: LIB3493-004-P1-M1-H1
ctcctttcccttgcatgctatggccagctttcttcgaaatgtttcatctcttaaacgttctctcttcgctccacaggtttgtaggggaggggtgttaaggtcatcttctcagctgtgtaacttttcttctaaaggtagaaggaaatccaagtcagattcaagtgattcgtgcgatgagaatatgtccaagaaagatttagctctaaaacttgccttggatcagattacgagttcttttggaaaaggatctatcatgtggcttggtcgtgctatgtctcatcgaaatgttccagtagtttccactggttcttttgctctggacatagcacttggaatc

SEQ ID NO: 2438 - DNA, 461 bp, Gossypium hirsutum
  Clone ID: LIB3493-004-P1-M1-H10
ggttatttcttcttggtttggaaaaatatgggaaaggtgactggcgaagcatatcccggaactttgtggtcacaagaacgccaacacaagttgcaagtcacgcgcaaaaatatttcattcgcttaaactccattaacaaagataggaggcgatctagcatccatgatattactagcgtgggcaatggagagattctagcaacccaaggaccaatcaccggtgaaccgaatggtgcggcaactggaggttcctccgcaaaatcagccaaacaaccctctcagcttcctgctgcaccaccaggtgttagcatgtattcttctccaactatagggcagccaataggagggccccttgtctcaacagttggcacgccagttaatcttcctgccccgccacatttaagctatgtagcagtggttctactgaccgatgaacatgggtctgtcaatactaatgcctat

SEQ ID NO: 2439 - DNA, 386 bp, Gossypium hirsutum
  Clone ID: LIB3493-004-P1-M1-H11
ctgtttttcttttgtgtggcgtcactgccctttcgcggacaagacaagaggaatcttttgggaaaaatatatacattttttgcactcatttcgctagcttttttttttctccaccatagaaaaagaaaaaaaaaaccaaaaaactataggtattttgtttccatttgcaaacagtgtggactttaatagcttattgtttcccatgtttatctgtaggaaaatcctttacagacgcaaactttcctttctgaatgaccttattattggttcacccttcatgtttagaaattaaaacatggctgatggctcccaacctttgtaattctcttcctttaaactgttcttaattggttgatgtagaattttatggatatatagctatcttc

SEQ ID NO: 2440 - DNA, 359 bp, Gossypium hirsutum
  Clone ID: LIB3493-004-P1-M1-H12
cgacccacgcgaacgttgactcgtactgtctgcatgatcggtgagagctgaaacgcttactgcacttgatttaacgaagagaagcttttgtttcgctgagaaataatccaaacgctatttctctgagttcggagatttctcttttgtttggatcaaactcaaaattcaaaattcttcgctctcaaaattcatagatcttttcttttctttccttttctttttcacttttaagatcttcacgtagaaatgcagcatcaacaaggagaagcttcttctaggcgtcaagttccgcttatctcaacgcgctctcactagaaatcgagacatgacttcagcggaaacgcagctcattacaagaa

SEQ ID NO: 2441 - DNA, 389 bp, Gossypium hirsutum
  Clone ID: LIB3493-004-P1-M1-H2
gtttggtgtcgacactatcacggaggattttgagttcaatgagttgaatgaggttctaaggtattaccctcatggtcatcatggtgttgataaggagggaagacctgtgtatattgaaaggttgggaaaagttgatcccaacaaactcatgcaagttactactatggaccgatatgtaaaataccatgtccgtgagtttgagaaggccttcactgtgaagtttcctgcatgtacaattgctgcaaaaagacacatagattcaagcacaacaattttagatgtgcttggtgtgggctttaagaattttaccaagtctgcaagggacctgattatgcgactacaaaagatttgcggtgacaattaccctgagactcttcatcaaatgttta

SEQ ID NO: 2442 - DNA, 368 bp, Gossypium hirsutum
  Clone ID: LIB3493-004-P1-M1-H3
ggttgcttgtggatttgcaaaacggaaagactgtagccacggtggtaggtcatctagattactcctttgcatctgcatggcacccagatgggcgcatatttgccactggaaatcaggataagacttgccgtgtgtgggacgttcgaaacctctcaaggccagttgcaactctcaaaggaaacttgggtgccatacgatcaatccgcttttcatccgatggtcaattcatggtggctgctgaaccagcagatttcgttcacgtgtatagtacacgtgctgattatgagaaaagacaagagattgacttctttggggagatttcgggagtatctctgagtccagacgatgaatctttgtatataggaata

SEQ ID NO: 2443 - DNA, 490 bp, Gossypium hirsutum
  unsure (1)..(490): unsure at all n locations; Clone ID: LIB3493-004-P1-M1-H4
atcaccgtcgtcgaagccatacatccccgactacaagctcgccttcgaacacttctgcgtccacgccgcaagcaagacggtgctagacgagctgcaaaagaacttggaactcagcgaaaacaacatggaagcatcgaggatgaccttacaccggttcggcaacacatcgagcagcagcatatggtacgaattggcttatttggaagctaaagaaagggttaaaagaggggataggatctggcaaatagcattcggttctgggtttaaatgcaacagtgtggtttggcgatccatgcgtcgtgtgaggaagccttcaaggggataacccatgggttgattgcattgatagataccctgtgagaagcttaaattacttcaatggccggtggttgtaataatttatgaccttntggtttacatttcagaaaaananaggggnnnnnnnnnnggggggggaggtngaaatgcatntgttgttcatggtctggaa

SEQ ID NO: 2444 - DNA, 305 bp, Gossypium hirsutum
  unsure (1)..(305): unsure at all n locations; Clone ID: LIB3493-004-P1-M1-H5
ttttcttttgtgtggcgtcactgtnntttggnggacaagacaagaggaatcttttgggaaaaatatatacattttttgcactcatttcgctagcttttttttttctnnntcttttttnttcctttttttttcccttaccccnttngtgttccgcttctctcttcctcccttgtttccttccgtctcttttggctgcttttcattgtttgttcccaggttgttggatcttgcacacaccattctgtgaatgaccttattattggttcacccttcatgtttagaaattaaaaccatggctgtggctc

SEQ ID NO: 2445 - DNA, 338 bp, Gossypium hirsutum
  unsure (1)..(338): unsure at all n locations; Clone ID: LIB3493-004-P1-M1-H6
gaaaaaccttgactcagccagccaccaagatcaatggcgacgcatatgctgagacgacaagtgagtcagatcctttcccatgccagccctaaccctaatcctgcctcgtatttctctttagctagacatttctcttcggcaaccgacaccattcgagccactctcttccccggcgatggcatcggccccgagatcgctgagtccgtcaaacaggtttttagaactgctgaagtgccaattgaatgggaagaacattatgtcggggaccaagttgatccaagaactcaaagttttctaactttgggaaagtctagaatcagtnagaaggaaatcgggta

SEQ ID NO: 2446 - DNA, 386 bp, Gossypium hirsutum
  Clone ID: LIB3493-004-P1-M1-H7
cagcatctagcccatcatgttgacgctaccatgtataaattattgagtggttttgccttgcagctttagattctcttgtaatagccatcaggttttgtgcttagcaaattccccgtctttccatataaaaatcatctcagctttctcttgctcttgtccctctctctctctctctctctctctctctctctctctctctcatataagctccgcctggcctaggcgccattctcatcatggctcattttcagcttttttcattaaaaatcttgcagattttttctcttcttctcatcctcctttaccctgcaacagtctcttgcgattgtacttgtgataaggaggacatccaacaaaataaagccgaagcactcagatataaacta

SEQ ID NO: 2447 - DNA, 166 bp, Gossypium hirsutum
  Clone ID: LIB3493-004-P1-M1-H8
cccacgcgtccgtcctaaatgaaaatgcttccttaatatggggatgtaagtggaagtataaagcaataaaattgtgcttttactttttccctatttggttgctacggtcatgttcgaaacgtaccactgcggaactaattaaatttaaagcttatcttctctcttt

SEQ ID NO: 2448 - DNA, 382 bp, Gossypium hirsutum
  Clone ID: LIB3493-004-P1-M1-H9
atcctttatacctcctgatgggtcctttgatctcatgacgtatagacttagtactcaggtaaagcctctcatctgggtagaagctcaagttgagaaacattcaagaagccgtgttgagattatggtaaaggctagaagtcagtacaaggagcgtagtactgctacaaatgttgagattgcgatgcctgtgcctactgatgcttccagtcgaaatattcggacatcaatgggatctgcagcttatgcacctgaaaatgatgcattaatgtggaaaataagatcttttcctggtggaaaggagtatatgttgagggccgagtttactcttcctagcataacagatgaagaggcaactccagagagaaaagcctctattcgtgtg

SEQ ID NO: 2449 - DNA, 70 bp, Gossypium hirsutum
  Clone ID: LIB3493-005-P1-M1-A1
atagtctgatgccagtaaatctggaaatagatcacagcggtgttcataagatggagctaagaaggacaga

SEQ ID NO: 2450 - DNA, 469 bp, Gossypium hirsutum
  Clone ID: LIB3493-005-P1-M1-A10
gaggagtttgagttttacctttctgattcagaatccaagctgttattaatcccagccgaaggcatcaagccggctgaagccgccgcttccaagttgaacatccctctcgtatccgccgctctccaggatgaaaattccaaaataactctctcctccaaccccgagtcaaatattgattcagtcaaacaactcgttaacgaccctgccgacgtctctcttttccttcacacttccggtaccaccagtcgtcccaagggtgttcctttgactcagctcaatttggggacttcagttttgaacattaaatcggtttacgaactcactgagtcagactcgacggtcattgtgctcccgttatttcacgtgcatggcttgttagctggcttactgagttcactcgtttccggagctgccgtcactctcccggccgccggcagattttctgcatcgacattttggacggacatga

SEQ ID NO: 2451 - DNA, 330 bp, Gossypium hirsutum
  Clone ID: LIB3493-005-P1-M1-A11
gaaaggtgcagtagcatcctctgtgatattccttagtgctacaacaactgccgcacttcactggttcgtgagcccttacatccacaaaatccggtggcagcctggttcagacagctttgaggtggagatgatgtcttggttagcaacatatattccacgaaccattaagtttgcagacatccgtccggccgagaccaacaggccattcgtgacatttaaggccaatgggaacttctactttgtagatgctgagcattgccataacaaggctttgttggcaagactcacaccccagaaagcaactcatgagtcagctcttaagaacttatg

SEQ ID NO: 2452 - DNA, 244 bp, Gossypium hirsutum
  Clone ID: LIB3493-005-P1-M1-A12
ctccttcttccttgactaggggtttccatttcccagttcttctcgtccctttcttaaagtcggcatcttcctttgctttctccagttttctcctacccagcaccttcttcaaggttccaagttctttttgtttctcctttaattgctcttgtatttagggatttaaattgcggatgctgccatatttttagttgggttgcgtttgtggtggtctgcttgcgttgcgtttgtggcggtcgcagat

SEQ ID NO: 2453 - DNA, 407 bp, Gossypium hirsutum
  unsure (1)..(407): unsure at all n locations; Clone ID: LIB3493-005-P1-M1-A2
acgcacactatgcatatgaaggcggctcatggaaaagctcaggaatctatatatcaccagaggaacccagttcctctagagaatttcagagggcaggagcggatgatagacctgcatggattgcatgttagtgaagcccttcatatgctgaaacatgaactatcagtgctgcggagcacagcacgggcagcagatcagcgtctgcaggtatacatatgtgttggaactggccaccatactaggggttctcgtactccagcgagacttccagttgctgtgcaacggtatctgcttgaagaagagggccttgactatacagaaccacagccagngctacttcgagttgtcatatattgaagccatggactngaacgcgttgagctatttaggggtttttgacactacag

SEQ ID NO: 2454 - DNA, 375 bp, Gossypium hirsutum
  Clone ID: LIB3493-005-P1-M1-A3
gaccgactcgtccgaatctctctcttcttctttttttttttttcgaattttggagcgaaaattgttggtaaatgcaagaaatccacttgatcgaaggtggccgtttgtttaacggcggcggcggcggcggcggcgacggagggggaggagacagaaagttacgagcacaccaccaagcacttaagtgtccccgctgcgactcttccaacacgaagttttgttactacaataactacaacctctctcagccacgttatttctgcaagaactgccgtcgttactggacaaaaggaggcgtcctccgtaacgtccccgttggcggggttgccgaaagcaaacgctcaaaaccaaaccttttcgaaaccaccgttcgca

SEQ ID NO: 2455 - DNA, 189 bp, Gossypium hirsutum
  Clone ID: LIB3493-005-P1-M1-A4
gtttggcacgcctcttatttcgctcaaaggaatactaaagcagtgcatttccttgtcattatagctatattttacatttttcttaccctctttttttttttgattttaaatcatattttttctacttatttataatatatatatttttaataaatttatatttaattttcttttatatcttttccactt

SEQ ID NO: 2456 - DNA, 332 bp, Gossypium hirsutum
  Clone ID: LIB3493-005-P1-M1-A5
cggacgcgtgggcggaggaggataagaaggctgcagaggagagggaagctgcaaagaagtcagctaagaagaaagaaagtggaaagtcctctgttcttatggatgttaaaccatgggatgatgagactgatatgaagaagttggaagaagctgttcgatccgttgagatgcctggacttttgtggggagcatcaaagctggttgctgttggttatggcatcaagaagctacagatcatgcttaccatagtggatgatcttgtttcggtgatactcttatagaggagtacctcacgacagagccacgcaacgaatacattcaaagctgtgaca

SEQ ID NO: 2457 - DNA, 95 bp, Gossypium hirsutum
  Clone ID: LIB3493-005-P1-M1-A7
aagactgcgttgatacagtgaaacaagtgcagtctcaagaacaagcataggcgaagatgatgtccagggcgcgagatggcatattgaagtgcatg

SEQ ID NO: 2458 - DNA, 421 bp, Gossypium hirsutum
  unsure (1)..(421): unsure at all n locations; Clone ID: LIB3493-005-P1-M1-A8
caaaaatggatggttattgtagcagaagggtaatcatgtttttggtgtttgcatttgcagcaataagcagagggtatggacaagaatcaaccactcttgttcctgcaatcatcacctttggtgactctgtggtagatgtgggcaataatgactatctccctaccatcttcaaggctaactatcctccttatggacgggactttgccaacaaaaagcctactgggaggttttgcaatggaaaattagccactgacatcactgctgaaactctggggtttacaacttatccaccagcttaccttagcccagaagcatcagggaagaaccttctgcttggagccaattttgcttcagctggctctggctatgatgacaaagctgncatggtgaatcatgccatcacattgacccagcaattaga

SEQ ID NO: 2459 - DNA, 415 bp, Gossypium hirsutum
  Clone ID: LIB3493-005-P1-M1-A9
cgacagggtttacaagggtttgaggcagccgcaaccaatggcccccaaagttgagaagaaatcagatccaaaggcacaggccttgaaagcagcgaaagcagtgaaatctggagccacatttaagaagaaggccaagaagatccgaaccaaggttacattccacaggccaaggaccttgaagaaggataggaccccaaagtacccacgcattagtgctccaccaaggaacaagcttgatcattatcagattctcaagtttcccctcacgactgagtctgcaatgaagaagattgaagacaacaacactttggttttcattgttgacattcgtgctgataagaagaagattaaagatgctgtcaaagaagatgtatgatattcaggccaaagaaagttaacacctgatcaggcctga

SEQ ID NO: 2460 - DNA, 424 bp, Gossypium hirsutum
  Clone ID: LIB3493-005-P1-M1-B1
cggacgcgtgggcggacgcgtggggcctttaacaaatttggtgccaactgtggccctgaagccgtttggttcaagaccggagctcttctcttggacggtaacaccttgaactacttcgggaagaacatccccatcaaccttgtggtggctgtcgttgccgaagtcgtccttgttggtggtgctgaatattacagaatcatcaatggcttggatttggaggacaagcttcaccctgggggaccatttgacccacttgggttagccaaggatccagaccaggctgctttgctgaaggtgaaagagataaaaaacggtagactcgcgatgttcgccatgctcggtttcttcttacaaagctatgtgaccggagaaggtccggtggagaacctttcgaagcacctggagcgatccttttggcaacaac

SEQ ID NO: 2461 - DNA, 330 bp, Gossypium hirsutum
  Clone ID: LIB3493-005-P1-M1-B10
agttcaattctcaccgattctattctccccagtcaagaagaacaagaagatggagagaactctaacccgctcattaatcgctgttgtaatctcttccttagccgcgattcgatcctacagaaggaagtctctcgatttatctggagctcttgccggatttctcgttatgactattcatttcgttgtcggatacaggttcggggcaatgttgcttgcctttttctttacttcatcgatgcttaccaaagttggagaagacaagaagcgacgagttgatgctgattttaaggaaggtggacaaagagactggatacagttttatacaatagt

SEQ ID NO: 2462 - DNA, 316 bp, Gossypium hirsutum
  unsure (1)..(316): unsure at all n locations; Clone ID: LIB3493-005-P1-M1-B11
gtatgcttggccatcgtataaagatgcaggggccgatcatctgatcccaatggagctggcattaaaggtcgctagtaaaatccgagcaagagagagatttgcagtatatgtcgttattcctttgtggcccgagggtgatacaaaatctctttctgtacaggaaattctatactggcagtctcaaacaatgcaaatgatgtatgatattgtcgcacgagaactcaaaagcatgcagattacggactcgcatcctcaagattacctcaatttctattgtcttggtaaagagggaagaggtcanccccggaaatgctcg

SEQ ID NO: 2463 - DNA, 272 bp, Gossypium hirsutum
  Clone ID: LIB3493-005-P1-M1-B12
ttgttatctctgagggtgtcttaataaacgccttcgatttactttcggtttccatttacttctttatttctacgtttttgaatttttagtaagcgaaaatgagagagtgcatttcagttcacatcggtcaggctggtatccaagtcggaaatgcctgctgggagctttactgccttgaacatggaatccagcctgatggccagatgccaagtgacaagactgtcggaggaggtgatgatgcttttaacacccttttcagtgaaactggtgct

SEQ ID NO: 2464 - DNA, 372 bp, Gossypium hirsutum
  Clone ID: LIB3493-005-P1-M1-B2
ggttcatctcactagtgttcaagagaagttacttaaggaaaggaaaaccatgggttctagatcaaaacccatcccgattggcccgaatcctgacccgaattctaaggagatccgctaccgcggcgttaggaagcgcccatggtgccgatacgcagccgagatccgagacccgaggaaaaagactcgagtgtggctcggcaccttcgacaccgacgaggaagcatcgcgtgcttactatgcgaaggcgcgagagttccgcggcgctaaggcgaaaacaaatttcgccgacaacaacgccaacgacttcacgcgcagacctagccagagcagcaccgtggagtcttgttctgcgccgccacttgaccttactct

SEQ ID NO: 2465 - DNA, 254 bp, Gossypium hirsutum
  unsure (1)..(254): unsure at all n locations; Clone ID: LIB3493-005-P1-M1-B3
gatcctgagaaacgtgagatatatgatcagtacggtgaggatgctctcaaggaaggaatgggtggtggagccgcggctcatgatccctttgatatattttcatccttcttcggtggtagtccctttggaggtgctagcagtcgaggaaggagacagagacggngagaggatgtagttcatcccctgaggtgtctctggaggatctttaccttgggacctcaaagaagctttcactttcccgcaatgtgatatgc

SEQ ID NO: 2466 - DNA, 321 bp, Gossypium hirsutum
  Clone ID: LIB3493-005-P1-M1-B4
gcaatatttaacctatgcattatccatgagaataaagcaagagccgtaagggatggtgcagtaagtgtcattttgaaaaagatcatggatggtgtgcttgtaaatgagttattggctatccttgcaatgctttcgactcatcaaagggctgttgaagaaatgggggagctgggggctgttccttgcttgattcgcattgtaagggaaagcacttgtgaacgaaacaaggaaaattgcattgcggtccttcacactgtatgtcttaatgatcgaaccaaaatgaaggcactaagggaagaagaaaattcccatggaacaata

SEQ ID NO: 2467 - DNA, 304 bp, Gossypium hirsutum
  Clone ID: LIB3493-005-P1-M1-B5
gtgaacatcatggatacactgaggcacgacgtgctactatggaaacaggagggaggaactattgtgagctctgaagctgtactatgtacgaggatgaaagctagcgatgagctgacttacaatgtcaccaggtgaagacaaattgatattaatgagatgcgagaatcttgctaaaccatcaagatgaagcatgacatatctgtcacgagatattgtactatatgaagatccagaaggatagttaactgacataagtcttagagatatagtcctgaattttgtgattgctggccgtgacacaaca

SEQ ID NO: 2468 - DNA, 366 bp, Gossypium hirsutum
  unsure (1)..(366): unsure at all n locations; Clone ID: LIB3493-005-P1-M1-B7
cttcttcctcgcaaagcagtaatggcgattccctttacggtttatcttcttttcctattcaatctcctggcatttgggacgttattttcttcagccaccctttttacagtccaaaaccattgcagtttcaccatatggcccgcttctctctccggcaatggtgcttcacttggtaatggtggttttgaattgtcatctggttcatcagctcaattccaggctccacctggttggtctggccgcttctggggtcgaactggctgcaaattcgacaactccggctccggcaagtgcataaccggtgactgcggnggcatactaaattgcacctttcggtgtgtgccacccgtcaccctggtagagttc

SEQ ID NO: 2469 - DNA, 429 bp, Gossypium hirsutum
  Clone ID: LIB3493-005-P1-M1-B8
cggacgcgtgggttaacagagctagtcgaggtgatttcagccctgaagaattgaaggaaagacaggccaaggcaatgcaagatccagaaattcaaaacattctatcggatccagtcatgagacaggtgttggttgattttcaggagaacccaaaggcagcgcaggagcacaccaagaatcctatggtgatgaacaagattcaaaagctggtcactgctggtattgtccaactgagataaactggagccaaaatttcaacttttttcttctttttatcctttttcccattttgtcggttgaacttgaatggattgttcataaaagtagttcctgctggaaatgttcaatagttgccttgtatttaaatggtttgttttgagccgtcaaaactggcgctggattctattatatcattgattttcaggtttt

SEQ ID NO: 2470 - DNA, 404 bp, Gossypium hirsutum
  Clone ID: LIB3493-005-P1-M1-B9
caacgtccgaaagcgcttgagttaattttaagtgtaggtcagccttaacaaaaaaatgtctcggagatatgatagccgcacaacaatcttttcccctgaaggccgtctctaccaagtagagtatgcaatggaagccattgggaatgctggctctgcgattggaatactatcgaaggatggtgttgtcttggttggtgaaaagaaagttacttccaagcttcttcaaacctccacatctacggaaaagatgtacaagattgatgatcatgttgcttgtgccgtggcgggaataatgtctgatgcaaatatcctaatcaacactgctagggtgcaagctcaacgatacacatatgcttaccaagagccaatgccccgtgaacagctggttcaatctctctgtgata

SEQ ID NO: 2471 - DNA, 325 bp, Gossypium hirsutum
  Clone ID: LIB3493-005-P1-M1-C1
cattgatggagcaatccaatggttggatggcaaccagctagccgaggccgatgaattcgaggataagatgaaggagctcgagagcatctgcaatcctatcattgccaagatgtaccaaggtgcaggggctgacatgggtggtggcatggacgaggatgccccacctaccggtggcagcggtgctggacctaagatagaagaagtcgactaaatcaaatataaagatagtattttgacgatgtttaaacagctctgctggtgctataatttatgttttcaagcaccctatgttttgatgtaatgaaaaaatctggtttatttttgg

SEQ ID NO: 2472 - DNA, 460 bp, Gossypium hirsutum
  Clone ID: LIB3493-005-P1-M1-C10
cggacgcgtgggcggacgcgtgggttcaagtacgtcatcctcggtggtggtgtcgctgccgggtatgcggcgagggagtttgccaagcagggagttcagcctggtgagctagccattatttccaaggaagcggttgctccatatgaacgtcctgctctgagtaaggcgtatctcttccctgagggagctgcaagacttcctggtttccatgtctgtgttggaagtggtggagagagattgcttcctgagtggtacaatgaaaaagggattcagttgatccttagcactgaaatagtgaaagcagatcttcctgccaagactctagtaagcgcagctggagaaacgttcaaatatcaaattttgatcattgcaactggttccacagttataaggttgacagattttggcgtggaaggagctgatgccaaaaacatcttttacctgagagaaaatgatgatg

SEQ ID NO: 2473 - DNA, 252 bp, Gossypium hirsutum
  unsure (1)..(252): unsure at all n locations; Clone ID: LIB3493-005-P1-M1-C11
cacaaaaataggattttgtagggtcagagtaccattttcatccttccgtcctgtgaaaccagatgatccaccattagatccattccttgtacatacattaactatacgttttgagccacgaagacagaggcctgttgaaggatcagcangaatgaagcaagacccccgaagtttcaagcttatattagaatatataaaagccttgnctactggacaggaaacagatnttatttagtatcatgcacgggatta

SEQ ID NO: 2474 - DNA, 328 bp, Gossypium hirsutum
  Clone ID: LIB3493-005-P1-M1-C12
gaataatgcaatgcgctttgaagagatactttctggatcaactcaaatgcttaactatgttgatataatagtagtagatctgcaagccaaggtatcatgacgttgttcttttgctaatgatgttaggccatattaattttggattttaattacattgtgtaggctgaagagtatgaaatcactaatttggaggccttcttttcaagctctgaatttaaagcctggtacgagttggatgaacaaagaaaagtcatcaggcatcatcttgcagatgatagatgatgacaaatcatagctgagacattacttggacaggtcattgatcctc

SEQ ID NO: 2475 - DNA, 195 bp, Gossypium hirsutum
  Clone ID: LIB3493-005-P1-M1-C2
cggacgcgtggggcaagctgtgggacggatgtttgacttttgtttttgatgaataaatatgggttgtattcgtctcaaaggatagcttttgggcatattttttaaatacaagaaactgcaaactatcaacttgatatttggatgttgccaaataagtttgaaatcatcatctgatattgttcaaaatttcaatct

SEQ ID NO: 2476 - DNA, 335 bp, Gossypium hirsutum
  Clone ID: LIB3493-005-P1-M1-C3
gaaaaacaaaatccttggtacttgaaacaggattcatcggaagtggaccaacagcctttttctccattatcatctccatcagactcatcagtcatgaaaaaggttgaacgtttggagagtgttactgatataccagagcgctcaagccccgtatctgttcttgacccaatattcgcagatgatcttatcagccccgcaagcatcagaacttattccggcgaaacatccattcaaccattaagaattcgattcgaagaacatgactctttggccacaaatcagagcaatcgaattaaaacttgtatggctgataaggaatcaatatttgagcacat

SEQ ID NO: 2477 - DNA, 58 bp, Gossypium hirsutum
  Clone ID: LIB3493-005-P1-M1-C4
atgaacctactgatgcaatggctgggcaaggttcgcatgattgaaacactgaacctac

SEQ ID NO: 2478 - DNA, 378 bp, Gossypium hirsutum
  unsure (1)..(378): unsure at all n locations; Clone ID: LIB3493-005-P1-M1-C5
cggacgcgtgggctggttactcccatttaataattttagggttttgtattagtactgctatatcttccaatttctccatttctgaaatataggcactgataaaagctaatacttcgtgcacccgtttccttaccccctcatgatatgccttgtttggattgtaccttaacgcccaatagctgatagccattcttttacacatagagtgatctatttatgaacttttatgctaaccaacatttccaactttgctccccatttgtggttgagaataccacatcgatcccctataggatttgtcgcgtgaacgaacattctcgaaactagtgctctactgattcctnctcagtttggcaaacaggacaaagactatctact

SEQ ID NO: 2479 - DNA, 396 bp, Gossypium hirsutum
  Clone ID: LIB3493-005-P1-M1-C6
cggacgcgtgggcggacgcgtgggcggacgcgtgggcggacacgtgggcggacgcgtggcgccagttattgtttattgggtttatggtggactgtatacgattttaggctactcttgtaacaattacaggttgcatcctaaagaagatgaggatgagaagaactttgcctccaaaaagaccgtcatcaaaggcgtccttgggcaacaatttcgtcagttcatcgccactaacctattatatatgataacaagaggaaatgatcccggagcttcttcagggcagtcaacttccttctttgttatagcaagacagtttattgtagcaatgttcgtattcgatacttaccaatattttcttcacagatacctacaccagaacaagttcttgtacaagca

SEQ ID NO: 2480 - DNA, 333 bp, Gossypium hirsutum
  Clone ID: LIB3493-005-P1-M1-C7
cccacgcgtccgatgatttcaaattcttactggaaattgcttctgcagaaaattcaggattacatgtatttgacttcctggcaaattcaattctgaaagaggtccttgaagccatccaaaagggaaagcctggtgctttttctccaggaagacctaaagaattcctcaaaaactacaaagcaagcctagatttcttggcctatcttgaaggctattgcccaactagtgctgctgttgcccgatttcgagccgcaccttcttatgttgagttcatgaagcagtggaattggtgtgttatttctcgttaaggtttcaagaaattgctggtgcact

SEQ ID NO: 2481 - DNA, 467 bp, Gossypium hirsutum
  Clone ID: LIB3493-005-P1-M1-C8
taacaaagagggtatctcttgggctactaaggacaaggtacaacaggctaattactttggttcattgactcaagcatcaacgatccgaattgggtcttacaatggagaagagatttatgctccatttaagagtcttcttcctatggtgaacccaaatgatattgtgtttggaggatgggacattagtgacatgaacctagctgatgcaatggctagggccaaggttttcgacattgatctgcaaaagcaactgagaccctacatggaatccatggtcccactccctggaatctacgatcctgatttcattgctgctaaccaaggtgaacgtgccaacaatgttatcaaggggaccaagaaagaacaagttcagcaggtcatcaaagacatcaaggagttcaaagagaaaaacaaggtggacaaaggtgtgtactctggactgcaacactgagaggacagcaatgtca

SEQ ID NO: 2482 - DNA, 392 bp, Gossypium hirsutum
  Clone ID: LIB3493-005-P1-M1-C9
gtggttttgaagctggtatctctaaagatggtcagactcgtgagcatgctttgcttgcttttaccctcggtgttaggcagatgatttgctgctgcaacaagatggatgcaacaaccccaaagtactcaaaggcaaggtttgatgaaattgtcaaggaagtctcttcttatcttaagaaagttggttacaaccctgagaagatcccatttgtcccaatctccggttttgagggtgacaacatgatcgagagatctacaaacctcgattggtacaagggtcctactctccttgaggctcttgaccagatcaccgagcccaagaggccctcggataagccactccgtcttccacttcaggatgtctacaagattggtggtattggaactgtccct

SEQ ID NO: 2483 - DNA, 160 bp, Gossypium hirsutum
  Clone ID: LIB3493-005-P1-M1-D1
gtcgttgaggaatcggtggtcctcacggtgatgcatgtcttaccggacgtaagatcattattgacacttatggaggctgaggagcccacaggtggggctttcttggaaggaccaaccagggcaggaggggtacatgtagacgtgcaggatgcctatgctg

SEQ ID NO: 2484 - DNA, 488 bp, Gossypium hirsutum
  Clone ID: LIB3493-005-P1-M1-D10
cgaatttatccttgatctttcaaggctaggcttctaccatcgccaccaccaccacgatggctttgaccaacatgctccgccgccgactcttctcccggtccttctcctcccacgatggtccaagccggtggacgacgcccggtcaccaagaacggcccaatggttacctcttcaataggacaccaccaccacctggtcaatcccgtaaatgggaagattgggaattgccttgctacgtcacgagcttcctcaccatcgttatcctcggtgtcggtctcaacgccaagcccgatctcactatcgagacttgggcacatcaaaaagcccttgaaaaactcgccgccgagtcgtcgtcatcttcttctgactgagatgttgtgaaacaaacttcaatctggatctatagggggtacggatctttgtgaacgcttttgattttctggtgataaaatgtgagttcgaataaaaagatggatccctttcttctc

SEQ ID NO: 2485 - DNA, 354 bp, Gossypium hirsutum
  unsure (1)..(354): unsure at all n locations; Clone ID: LIB3493-005-P1-M1-D11
gtagcttttgaagcttggaacttctgcaatgaagttgcccatgaagctcctggcatggngagtccgagagctgctgattgttttgacgtttcaaattcaaccctgttacacaaggtatctgaggcagataacaagcttggaataggcaaaacgtntaaaggattatctacagaagcaatgcatcggccagatctgtatgcagttgagaaggagttgtaattgggttctttatgcgaagtttcagacagttcaaagccatggcaattttgggatggtatgttgaaaaatggaaactttgataccaaaggccggttttgtcctgaaaatgggaaacccaaaccctcttttactact

SEQ ID NO: 2486 - DNA, 184 bp, Gossypium hirsutum
  Clone ID: LIB3493-005-P1-M1-D12
ccgccgatttatttgataaagctgctaattgcttcaagcttgccaaatcatgggacaaagctggatcaacttatgtaaagttggcgaattgccatttgaaatcagacagcaagcatgaaacagctcaagcttatgttgatgctgctcattgttataagaaaacagctacaaaggaggctatatc

SEQ ID NO: 2487 - DNA, 355 bp, Gossypium hirsutum
  unsure (1)..(355): unsure at all n locations; Clone ID: LIB3493-005-P1-M1-D2
cccacgcgtccggtgccgggaaggtgagaggccaaactcctaaagtggccaagcaagacaagaagaagaagccccgtggccgcgcttacaagcggatgcaatacaaccgacgcttcgtcaccgcagtggttggatttggcaaaaagaggggacctaactcatctgagaagtaagagatctatgtaggtgaagaaggcaagaagccttgttgaaagctttgatggantttaagtctttgttttcttttgataatgtttttatgatattggtttcagggattggattgaactgccattttgtttgctagaatttatgtgatattgttatcaattatcttaatttttggtttactatg

SEQ ID NO: 2488 - DNA, 374 bp, Gossypium hirsutum
  unsure (1)..(374): unsure at all n locations; Clone ID: LIB3493-005-P1-M1-D3
cagattttccgtgaaaatcaagaaggaaaaaaaacccttaaaatcaaaaccctaatcctatttttttttcctttttgattgtagaaaacaaagcaagccctcaactggacaacatggggtctgaacagaatcaaggaaccagctttcccccgttggagccgaagctttgcgctaacggttgcgggtttttcggaacggcggcgaacatgaacctctgctccaagtgttaccgggacctccgtgctggggaggagcaagcggcgaaggcgaaagctgccatggagaaatcccttagcgtcaaaccgaaagaagatgttgttgtgnagacgtttaagcccgttgagaagctgcctcatgcgggttcatcatcaggc

SEQ ID NO: 2489 - DNA, 422 bp, Gossypium hirsutum
  Clone ID: LIB3493-005-P1-M1-D4
ggatgaatcagttgcctctgctatttcagaaaacgacattgtagcgtctgctgtactttctgggaaccggaattttgagggtcgtgttcatgccttaacaagagccaactaccttgcttcacctcctttagtggttgcatatgcccttgctggcacggttgatattgactttgacaaggagccaattggaactgggaaggatggtaagagtgtctatttcaaggacatctggccttctactgaagaaattgcagaggctgtccaatccagtgtcttgccagagatgttcaaaagtacttacgaggctattacaaagggcaatcccatgtggaatcagctatcagtgccttcttccactatgtactcatgggaccccaactcaacctacattcatgagcctccatacttcaagacatgaccat

SEQ ID NO: 2490 - DNA, 377 bp, Gossypium hirsutum
  unsure (1)..(377): unsure at all n locations; Clone ID: LIB3493-005-P1-M1-D5
aaaaaacctcctcgaattttcctacacctaccgcgcattttagcaaaaatggcccggcatccgatagccgaagccaacgaggagagccccttcggcaccttaactgcngacgaattctatgcccgccactcagtgagtcactcatccgagttcatcactaacgctcgcggtctcaaactcttcacccagtcttggaccccactcgatactccgatcactggaatcgtcgccgttgtccacgggttcaccggcgagtcgagctggttcctccaacttacctctgttctttntgccaaatcgggattcgccacgtgtgcgatcgatcaccagggccacggattctncgaaggcctngacggactcgatactcatattcc

SEQ ID NO: 2491 - DNA, 384 bp, Gossypium hirsutum
  unsure (1)..(384): unsure at all n locations; Clone ID: LIB3493-005-P1-M1-D6
atagtccactcagacaatgtaagacttgaacacgatgtggctttccttaaggctgttcttgacgatactcaaaaggagcttcactcaacgcgaggagtccttgcaggagagagggccagagcattccagttacaggttgaagttttccatctcaaacaaaggttgcaatcaatggagaaccgagcacccactcctaggaaaccattcaatgtatagtatctcagatcagatcttacccattgtggtcattcatgtatctatntgccatacgtgatccctggtacatgaaaaactgtcgaaccttgccggagtcgagcctttgtctgcaaaacaaagcatgagatctgtattctgtagtctacctcattcccatgtaaatataaa

SEQ ID NO: 2492 - DNA, 462 bp, Gossypium hirsutum
  unsure (1)..(462): unsure at all n locations; Clone ID: LIB3493-005-P1-M1-D7
gtgctggtaaagttaaatgccttggtgggccagaacgtacaggtagtgtgacaattgttggtgctgtttctcctcctggaggagatttctctgaccctgtgacatctgcgaccctcagtattgtccaggttttctggggtcttgacaagaaacttgctcagaggaagcatttcccttctgtcaactggcttatttcatactcaaagtactcaggggcactggaatctttctatgagaaatttgatcccgactttattagcattaggactaaggcccgagaagtgcttcagagggaagatgatttgaatgaaattgtccagcttgtaggaaaggatgctctagctgaaacggataagatcacactggaaactgctaaacttttaaagggaagattatcttgttcagaatgcntttactccatatgacannngtctgccgttctacaaagttgtttggatgatg

SEQ ID NO: 2493 - DNA, 383 bp, Gossypium hirsutum
  Clone ID: LIB3493-005-P1-M1-D8
cccacgcgtccgcgccgtcagacttctcgagccgatcaaggagcagttccctaacctcacctacgctgacttctatcagctcgctggtgtcgtcgccgttgagattactggtggacctgaaattcccttccatcccggaagagaggacaagcctcacccaccacctgagggccgtcttcctgatgctaccaagggttctgatcacttgaggcaggtgtttagtgctcaaatgggtctcagtgaccaggacattgttgctctttctggtggccacactctgggaaggtgccacaaggagaggtccgggtttgagggaccatggactaccaaccctctcatctttgacaactcttacttcaaggagcttttgtcgggagagaagg

SEQ ID NO: 2494 - DNA, 413 bp, Gossypium hirsutum
  Clone ID: LIB3493-005-P1-M1-D9
cgtgttatgacaggatcaccgtttcagctgtcaccaaagagaatcacagtatcaacggttgggattattcatgctatcaacaagctttatagcgatctaccgggcttgaacctagcagtatcattgcatgcgccagttcaagagatccgttgtcagataatgccttcagcaagagcttttcctttggaaaaactaatgacagccctgcaaacatatcaaaagaacagtcagcaaaaaatattcatcgagtacatcatgcttgatggaatgaacgatgaagagcagcatgcacaccggctcggcaaattgctggaaacttttcaagtggttgtaatttaataccatttaatccaattggtagctcaagtcaattcagaacccagagtgacccaaaagtatcagacttccaaaaa

SEQ ID NO: 2495 - DNA, 369 bp, Gossypium hirsutum
  Clone ID: LIB3493-005-P1-M1-E1
ccagtatcgccgattgggctcgacaccgtaaacggcgccgagaggatatgaagaaggaaaatgttttggatcttagtttatgccctgaggagcaggttttaaatgacggccaaccagatatggacgatgctgcaggctgtgaaaatcaagatgaggaggcggtggcgatggttgaagaaacacaatcaggtgatgaggatgctaatagcaatgaatcgagctggaatatggattgttccaccgttctgagagttaaaacattgcatattagctctcccattttagccgcaaaaagcccgttcttttacaaacttttctcaaatgggatgagagagtcagagcaacgggctgttaccttaagaatcaatg

SEQ ID NO: 2496 - DNA, 476 bp, Gossypium hirsutum
  Clone ID: LIB3493-005-P1-M1-E10
cttctccagaacgggttggttcactagagttttcttcaaacgaccctgcaatggtttcttttcaaaaagggccatttaatgggtttggttgtactagctccagctctagaggctacagtggtagcaaaagtgatcaacgttcttgtcatggcagtgtctctactaatagtttaggaataagtggtcataactggcctacgcttgctgaagcaagacaaggagggagctgcaatgacttctcctgcagttgtactgtaacgcttgatacactaagtgagcgtaataggggacctagggcatttaagccgtaaacacatattactacgaatggttttatttgttgattgcaacatgaatggcacaattaatgtcattaccaatggatcctacaaccgacagaattttttaactgattatgagggtgccaagttctttgtgataaaatcttatagtgatgatattgttcatatgttcat

SEQ ID NO: 2497 - DNA, 399 bp, Gossypium hirsutum
  Clone ID: LIB3493-005-P1-M1-E11
cttctctttcatactctctaattttctttttagatcgctttgaaaaaaaaaacccaccaccattgagttcttttgaagtttagattttttgatttaatttagaaattcagttattgactttatcactgtagtcacctggttcatctcaaccgaacgtcaagtctggggatgggtacaccatcaatggtcgagtgaagatcccccaaggtctgggtacaaaagggtttgctttgcctggaaaaacgtcaaatgtcaaagttatactcaatggtggccaaattgttacttatctgagacctgatggatatttttcatttcagaacataccagcagggactcatttgattgaagtggctgctattggctatttcttttctcctggtagagttgatgtagtgc

SEQ ID NO: 2498 - DNA, 432 bp, Gossypium hirsutum
  unsure (1)..(432): unsure at all n locations; Clone ID: LIB3493-005-P1-M1-E12
gttggttcaaataatgtcagtgttgggagtaagaaatgctgccccagtgtttagcttggttccaacagttggacccttcaaaccagcaggacttttgccttcaataaccgaggaagacagagttatactgaataatgtccaaaaaattctcgaattcttaacagcgggaagttcaatatcaacgacgtcaagtcagggtgtaaatgttgctcaggttatccaggagttgcttccagtgttgccaggcatatctgccagggttcttcccgagttgattagccggttatcgtctcgtgtgttagcacgtttaatccgggatacatttttgtaagcatttttaacgtaactagtctcttcaatngtgtatatgctngtatagcagatcttgatattatataaaatggatataataatntatatgtctttagattt

SEQ ID NO: 2499 - DNA, 391 bp, Gossypium hirsutum
  Clone ID: LIB3493-005-P1-M1-E2
ggagtccactaaaatctcagctctctttctcatttgcatgcttttcatttcctccgccactcccgttcttggttgtggttcatgtagcactggcaaagcaccaccaaagccccctaaaggccccattataatccctcccatttttaatcccccaatcaacctccctcccattctaaatccccctgtgacagtccctccggtgatggtggttcctcccataattactaagccaccaagtgggaaaccttgcccgtcggccacttgccccattgacacattgaaattgggtgcatgtgtggatctgcttggagggttggttcacattggccttggtgacccagttgtgaatgcatgttgtccagtccttgcagggcttgttgagctggaagct

SEQ ID NO: 2500 - DNA, 390 bp, Gossypium hirsutum
  Clone ID: LIB3493-005-P1-M1-E3
gaagtactaaggtatcttctttcaaatgcaagatggtggctggaggaatataagtttgatgggtacagatttgatggtgtgacttcaatgatgtacatccatcatgggttgcaggtaggatttactggaaattacaatgagtactttggatatgcgactgatgtagatgctgttgtttatctgatgctggttaatgatatgattcacgggctctatcctgaggctgtcaccattggtgaagatgtgagtggaatgcctacattctgcattcctgtccaagatgggtggtgtgggattgattaccgtcttcacatggccattgctgataaatggattgagattcttaaaaagagagatgaagactggaaaaatgggtgatattgttcacac

SEQ ID NO: 2501 - DNA, 436 bp, Gossypium hirsutum
  unsure (1)..(436): unsure at all n locations; Clone ID: LIB3493-005-P1-M1-E5
cggacgcgtgggtggtagctgagatcgtctttctccggtttccacattgtttttgtttttcgcagttaatacaagatggctgatggtgaggatattcaaccacttgtctgcgacaatggaactggaatggtcaaggctggatttgctggtgatgatgctccaagggctgtgttccctagcatcgtggggcgtccacgtcacactggtgtgatggttggtatgggtcaaaaagatgcatatgttggggatgaggctcagtccaaacgtggtattttaactctgaagtatccgattgaacacggtattgttaacaactgggatgatatggaaaagatttggcatcataccttntataatgaacttcgtgtggctccagaagaacatccggttcttcttaccgaggcacctcttaaccctaaaagccatcgtgagaaaa

SEQ ID NO: 2502 - DNA, 241 bp, Gossypium hirsutum
  unsure (1)..(241): unsure at all n locations; Clone ID: LIB3493-005-P1-M1-E6
ttctcattttagcgtagtcccccattttgcaatatacccttcaagctccaagattctctcccatggcgtcttctttaacaacactgtcaaatgtgggtcttctttcatctccaagaaccccacccaagaaccaacccatttccacatccagtaattccttgaactnntcctcgacactctcactttcccccaagatttcatcttcatcgagttccttctctgggtcatttcgttttccccg

SEQ ID NO: 2503 - DNA, 448 bp, Gossypium hirsutum
  unsure (1)..(448): unsure at all n locations; Clone ID: LIB3493-005-P1-M1-E7
cggacgcgtgggcggcttcggctctaagtccaccgccgaggaagtcaccgagacttgccctgatctccgctctataacagtcatcatcacaggtgcgacgtcggggatcggagctgagacggccagagtgttggccaaacgaggagcgaggttggtgcttccagctcggaaccttaaagccgctgaggaagcaaaggctaggatagtttccgagtttcctgagtcagaaattattgtcatggctcttgatcttagttcactcacttctgttcgaaattttgtatcggagttggagtctcttaacttgccagtcaatatcctcataaacaatgcccggaagtttgcgcatgaacatgcaatctncgaggatggaatcgagatgacatttgccactaattaatcttggtcattttttggtggacgaagtgttgctaacacgatgatgaga

SEQ ID NO: 2504 - DNA, 328 bp, Gossypium hirsutum
  Clone ID: LIB3493-005-P1-M1-E8
gttttaacactcataatgatggtgctaatggtcagataatgcaccggtctgatataagtcggcgctttccttgctctaatggttctggtattgctgctatacgaaatattggtagagacacattggtgaatcctgatatttcttataagggtgtaggctctgaggaatctttcagattccaaaaggtcttgcaaggtcaagaaacttttgtaagccctccatgtagaagaggtccaactgtagatgacactcgagaaagtgacagtcctggtgcccctgatgttggtcagttgtcgggaacctagaagtggatggtcttctttgatgc

SEQ ID NO: 2505 - DNA, 402 bp, Gossypium hirsutum
  Clone ID: LIB3493-005-P1-M1-E9
cggacgcgtgggctgcaatcaaattccatccatagaatctggagtcgggactgtaaattatgagaacagttgacattcaattgtattggtgaagaccggaaggaacgtgtaatttattagagagtaaacaagacagagatgttctcactcttttatggactttataagtacctatttagcaagacagagtttcatgtactcattcttggaatcgacaaggctgggaaaacaactttgttggagaaattgaaatccgtatactcaaacttggaaggtctaccacctgatcgaattgttccaactgttgggcttaatattggtcgcggtcgagttctaaatgcaaaacttgtgttctgggacttgggaggccagcctggtcttcgctcaatttgggagaaatac

SEQ ID NO: 2506 - DNA, 335 bp, Gossypium hirsutum
  Clone ID: LIB3493-005-P1-M1-F1
gcactgcgtactgtgtattagcccaacgcctcagcactccaaacccgaaagtcttcatgaggttcttctgccaacggaatgcaaataatcttctcggcaacatcctccgaaaaggtattatctgagtacaatctttatcccatgccccattcttccacatccaaaacaaaacatcggtaaattctcatgcttaaaaggaacacacactttattaacattatcactagagacaaaaatacctcggcgaattggtttctgaacatccaagttaattctgagctgacaaaagacttcattaatttcaaatctgagaaccccacccaacgtaacaccga

SEQ ID NO: 2507 - DNA, 432 bp, Gossypium hirsutum
  Clone ID: LIB3493-005-P1-M1-F10
cggacgcgtgggcctttccctgatggagtccttatcaatggtcgtggacctggtggtgcctccttcaatgttgaacaaggcaaaacctacaggcttaggatatcaaatgttggactgcaaaattctctcaatttccgcatccaaaaccacaggttgacgttggttgaagtggagggaacacacaccctgcaaacgacctattcttccatcgaccttcacctaggccaatcgtgctccgttttattcacagctgatcagcctgcacaagactattacattgttgcctctactcgcttcaccaaccccgttctcaccactactgcgacccttcgttacagtaattctgctggtcctgtctctggtcctcctcctggtggacctaccatccaaatcgactggttttgacccagcacgctctataggactaaccta

SEQ ID NO: 2508 - DNA, 277 bp, Gossypium hirsutum
  Clone ID: LIB3493-005-P1-M1-F11
ttttgcttgtggaggggagaggagactgatcaagtgagggaaggtcatcctgacccatcatcttctctagtggagaagttgctatggacttacatggatcttccgtacgtataggctatatctgtggctacatgacatttggattagcatacagatgatttaggcgttattttgaatttttccctaaagacgagctaggctgtgaaataagtgtgcctgtgctgtatgttatcatagatgtgtgcacattattacgttaagatattggatgagtatg

SEQ ID NO: 2509 - DNA, 156 bp, Gossypium hirsutum
  Clone ID: LIB3493-005-P1-M1-F12
ttatgtcaaggaacatcctgtgatgaattacatgaaaggggtacctgaccttactcatcctccattcattttaaacaaatcataacctatcatattataatttcaaactttttacttcaaaatacttttaatttcccaatcccaaaccccatcttt

SEQ ID NO: 2510 - DNA, 338 bp, Gossypium hirsutum
  Clone ID: LIB3493-005-P1-M1-F2
ggcattttagagagagtcgttggctgagatccgagttttgcgagaaaattaaagggaagggaagtactagtagttgaggcgaagctgaagctaatacaaaacagcggcaatctctgatttcagccctccgacacttcatccagattctgctcaatttctccgtttgattgaggattgggccaatcaaaacatcctataggtatctaaatcttctttatttacatttttggatctgcgccattgctattgcaatgtcccttttatccagattgcgatgtatcacttgtggtgttactgggactctcatagcttataaaggggagcttgggattactact

SEQ ID NO: 2511 - DNA, 412 bp, Gossypium hirsutum
  Clone ID: LIB3493-005-P1-M1-F3
aaagtattttgctttgcctaattgtaagctttgaggttaagtgaaaaaactatggctgaagagggacaagtaattgcctgccacactgttgagtcatggcagcagcagctccagatgggaaacgagtccaacaaactggtggtggtggatttcacagcatcatggtgcgggccatgccgttttatatcaccaatcctagtggatcttgctaagaagctgcccagcgtcatattcttgaaggtggacgtggatgaactgaaatctgtcgctcagtcgtgggctattgaggcgattgccaactttgtgtttctgaaaggaggcaccataattgacaagcttgtgggtgcaaggaaagatgaattgcagcagaaaaatgccttccattcatctaacctgggcagacagcatgaat

SEQ ID NO: 2512 - DNA, 327 bp, Gossypium hirsutum
  unsure (1)..(327): unsure at all n locations; Clone ID: LIB3493-005-P1-M1-F4
ctcttacagctaagctttaagcaaaatatgaggtttgcagtagcagctaaagctgccttgctcctgcacctttcccttttcgtactgagtagcttcacggtgtcctctcagatcttgcctgaggctttgcctcctcattaccatggaatttcgcctgtagtgccacctgctcacccaccaagccaccaccatcaccatcaccatccccatccgcatccccacccgccaaccccttnccctactaagcccccaactcacccgcctgtttaccccccgcccaaagcacccaagatggctccaagttatccaccacccaagtcaccaagc

SEQ ID NO: 2513 - DNA, 362 bp, Gossypium hirsutum
  Clone ID: LIB3493-005-P1-M1-F5
acctactgcagttgggttcaaccctggagttgctgctggtgggtttaaccctgctgctgctgcacctgctttaaacccagcgcttggacaggctttgactgcattgcttgctggccagggtggtttggggcttggtaatctgcttggagggcttagtggcgcccctgtgaaccaagggacacctgctgcagggtatgggaatcaggttgctggaggctatggagtgcagggtggatatcagaacccacagatgggtcagggcggtgctggtaggaatcaacctggtagtggtgctccttacatgggacattaggtatggcctaagatgctctcatagatgccatcaatcatttattttcgac

SEQ ID NO: 2514 - DNA, 303 bp, Gossypium hirsutum
  Clone ID: LIB3493-005-P1-M1-F6
gaaagatactgattctgaggaggaacttaaagaagctttcagggtgttcgataaggatcagaacggtttcatatctgctgccgagcttcgtcacgttatgacaaatcttggcgagaagcttaccgacgaggaagtcgatgagatgatccgtgaagccgatgttgatggtgacggccagatcaactacgatgaattcgtcaaagtcatgatggccaagtaaggatctctccaaccaaaaaaaaaaaaaacagagtggataagtttgcaaaagattcaatctcgtaaattggttcgtggggtcgt

SEQ ID NO: 2515 - DNA, 332 bp, Gossypium hirsutum
  unsure (1)..(332): unsure at all n locations; Clone ID: LIB3493-005-P1-M1-F7
tgcttgtgctgtggcgggaataatgtccgatgcaaacatcctaatcaacactgctagggtgcaagctcaacgatacacatatgcttaccaagagccaatgcctgttgaacagttggttcaatctctctgtgatacaaagcagggttatacccagtttggtggtctccgcccattcggtgtttcatttctttttgcaggatgggacaagaactacggattccaactttacatgagtgatcctagtggtaactacagtggatggaaagctgcagctatcggtgccaataatcaagcagctcagtcaatgttgaaacangattacaaggacaata

SEQ ID NO: 2516 - DNA, 439 bp, Gossypium hirsutum
  Clone ID: LIB3493-005-P1-M1-F8
aaaaaactaaaaaaacctctgaaaaaagggctccgaccctcggagctccggcctcgtggctatcctggctcgtcccagtgtctggcgtgcgtggtctccacgcgcttaacgagccgccaccagagccaccgtatacggtggttagggtttcaaaaaccctccctttcctttgccgattctcaggtatcaaccttctccctctgttttgagtttctattttttagatctgggtgtgtgcatgttagtaaatgaccagataagattaaaaaagaagaaaacgattcgattacctttgaaaaacgagattcgccttttatttctctgtttcaaaaggattacaatggttcgtgctattctattaggtaaatccctataccttcttttttggttctctttgcttctaaaaactctctttttttgattccctactattcttctc

SEQ ID NO: 2517 - DNA, 339 bp, Gossypium hirsutum
  Clone ID: LIB3493-005-P1-M1-F9
cttgttgcagattgtcacctacttccagcagttgcagtgggagagatggaagggaaagcaatcaaacattatgctttaacaaatgggaaaccaaccgcaactctagcctttttaggtaccagattgggtgttaggccatcaccagtggtggcagcattttcatctagaggaccaaatttcctcacacttgagattctcaaacctgatgtggttgcaccaggggtgaacatccttgcagcctggactggagaattgggtccatcaagtcttccaacagatcataggagagtgagattcaacatattatcagggacttcaatgtcatgccctcatgttagt

SEQ ID NO: 2518 - DNA, 286 bp, Gossypium hirsutum
  Clone ID: LIB3493-005-P1-M1-G1
cggacgcgtgggctctcacgaggtcataactggttctagcatggaaccttcagaggaggaacttgctgactttatgcaagcttgcaacatgctgtggctacttgatttaaaccgtctggaacctgggaaggattatcaaattgactgtggtgaacggaagaaggttttccagaacgaagatatggcacaaggaagcctattttgttatgttgatgaggacatttctagaacaaaacctacaattgctcgtttttgttctctcttggataattacaacccaaatgct

SEQ ID NO: 2519 - DNA, 373 bp, Gossypium hirsutum
  Clone ID: LIB3493-005-P1-M1-G10
ctttcttgaaagaactgtatattgaaggaaacgcattccggcctggcgtaaaccccattggtgcacacaaggtccttgaactttcggacgcagatttcttggtttagttaaaaactgtcaagaacacaagccttattactatcaaacctcatggccatggatttctagttatccaaactcagtaatatttgtactgtagatatgaactcagttctttattgtctttgtatgtggtgtttttaaggaaaaacagctcaaatctggaattaaagttggagaatgatctaataccttatattcatgaaatttttcaattttgtagctattatttcgtaaccaagaaaattaatgaaaaaattatcattcttttagt

SEQ ID NO: 2520 - DNA, 287 bp, Gossypium hirsutum
  Clone ID: LIB3493-005-P1-M1-G11
cgaccaaggaacatattcgtgtttttgctgatgatgttgttgagaggtctgaagtgactactggtattacaaaaattggagagtatgagcttcatgatcttgtgctactagataacaatagctttggtgtaattatacgtgtagaaagcgaaacgtttcaggttcttaagggtgtcccagagagaccagaggtttctcttggcaaattgagggaaatcaaatgtaaggttgataagaaaattaatgggcaagacagatataggaatactgttgctgtgaaagatgta

SEQ ID NO: 2521 - DNA, 301 bp, Gossypium hirsutum
  Clone ID: LIB3493-005-P1-M1-G12
cccacgcgtccgggaaaacaggcgtctacacatacataggtcaatggccaatttactccgtggcatggtccgtccgcaacgacaaaagatctcgccttgccattggcagtttcctcgaagactacagcaacaaggtggaactggttcagttcaatctctatacatccgatttcacgactgacaatcggttagttttcgatcacccttacgctcccaccaacctaatgttctttccgtccgatgatacctctaatcccgatatgattgccacgtgcggcgactacctttgtctttgggaaat

SEQ ID NO: 2522 - DNA, 374 bp, Gossypium hirsutum
  Clone ID: LIB3493-005-P1-M1-G2
gtcaacccttgcagttagaaatgcagatttttctgcccttcagaataacttaaaagaactagaggaactgagggaaatgagagaggatattgatagaaagaatgagcaaactgctgccatcttgaagatgcaaggggcccaacttactgaattagaagtgctttataaggaagaacaaattttaagaaagcgatattttaatactatagaagacatgaaaggcaaggttagagtgttttgccgcttaaggcctttaaatgagaaagagatgcttgaaaaggaaagaaaagtgctaatgggcttggatgaattcactgtcgaacatccatggaaggatgataaagcaaaacaacacatgtatgatcgtgttttga

SEQ ID NO: 2523 - DNA, 325 bp, Gossypium hirsutum
  unsure (1)..(325): unsure at all n locations; Clone ID: LIB3493-005-P1-M1-G3
cggacgcgtgggcgccgctaacctccatcaacacctcacttcccttcgccctcaccctctcatcctccgttgggtccctcatcctcccgctcgctcccaagtcgattctgcgttccggttcgtaactcgccaccaggataatccccggagcgatgaagaagcacttctcctggattcctccgacttcagggaatgggcagtggttttattcagcgatgccgtcgtgggaaacgctggaaaggcagttttgcagcgagtgccggttggngttttgggtattgcggggattggcgcggcggcnaggagggggaaagaggtgttgggg

SEQ ID NO: 2524 - DNA, 409 bp, Gossypium hirsutum
  Clone ID: LIB3493-005-P1-M1-G4
ctcaaaggatggtcagacacgtgagcatgctttgcttgcgtttacccttggtgtcaagcagatgatttgctgctgcaacaagatggatgcaacaactccaaaatactccaaggcaaggtatgatgaaattgtgaaggaagtctcctcatatcttaagaaatttggttacaaccctgacaagatcccatttgtcccaatctctggatttgagggtgataacatgattgagaggtctaccaaccttgactggtacaagggtcccactctccttgaggctcttgaccagatcaatgagcccaagaggccttcagacaagccacttcggctcccacttcaggatgtctacaagattggtggcattggaactgtccctgttggtcggttgagactgtgtccttaagcctggaat

SEQ ID NO: 2525 - DNA, 376 bp, Gossypium hirsutum
  Clone ID: LIB3493-005-P1-M1-G5
ctttcttgaaagaactgtatattgaaggaaacgcattccggcctggcgtaaaccccattggtgcacacaaggtccttgaactttcggacgcagatttcttggtttagttaaaaactgtcaagaacacaagccttattactatcaaacctcatggccatggatttctagttatccaaactcagtaatatttgtactgtagatatgaactcagttctttattgtctttgtatgtggtgtttttaaggaaaaacagctcaaatctggaattaaagttggagaatgatctaataccttatattcatgaaattttcaatttttgtagctattattttgtaaccaagaaaattaatgaaaaaattatcattcttttagtaat

SEQ ID NO: 2526 - DNA, 428 bp, Gossypium hirsutum
  Clone ID: LIB3493-005-P1-M1-G6
agtcgaaatggcccgacttctacccactgagctttactctctactgatcttgggggccatcatccatcactcatacggacttaagcattcgaaaggtatagccctcgtcgacgaggtttgccgccacacatcccacactgaatattgcgtcgataccataatcccaaagccaccattatccggcgaaaggatcgccagtaccactttgggttgggcacagataaaagctctggaagccggaaccatcatagctagtctacttaatgattcttcttccatcttacaagtggcaaagaaccctgtacaggccaaagagcttctccaaatatgttgggattctaacatgaacaccatggaggacctttggattgctagcagtttattttacaataagatcatcaatcccatgattgcttcgctggatcatg

SEQ ID NO: 2527 - DNA, 329 bp, Gossypium hirsutum
  Clone ID: LIB3493-005-P1-M1-G7
cggggaagttgtgccctcaactgcagcatgtagagttgtgtgggcttcatggaataacagatgctggggttctcctgttgctcgagagttgtgaggctggtttattaaaggttaatctcagcggttgtgtgaatttgagcgacaaagttgttcaaacgatctccaacttgcatgggtggactctagaactgctgaatctcgatggttgcaagatcagcgacgctagtttagttgcaattgccaaaaactgtcagttgctaactgatctcgatatctccaagtgcaccatcaccgattctggaatcgcagctctggcttatttcaatccg

SEQ ID NO: 2528 - DNA, 463 bp, Gossypium hirsutum
  Clone ID: LIB3493-005-P1-M1-G8
ggcaatttttccttgttttcgtaggtaaaaactaaatccaaaagcaaatcatcggtggacgctaaccggaccgggaacatgccaccggaagacaaccaggttccactattgtccgacgaggaatcggaccaagatgtagcgtacgagtcaggcgaaaaggttcacatcgtcggaatcgacgaaccggaggatgaaggcttgttgggtaccccacctttttcttggaaaaagctatggcttttcaccggacccggttttttaatgtcgatagcgtttttggatccttgggaatttggaaggggatcttcaagccggagctatagccggttactctttgctgttggtggtgatgtgggctacggttattgggttgtgggtcagttttgtcggctagacttggtgtagcgaccgggagacacttggctgagctttgtaggggagagtattcgacttgggctaggat

SEQ ID NO: 2529 - DNA, 310 bp, Gossypium hirsutum
  Clone ID: LIB3493-005-P1-M1-G9
cggacgcgtgggcttaattgcaccttgccactgcaggggcactcagaagtatgtccatagatcctgtcttgataactggaggtcaactaaggagggctttgcatttgctcactgtacagagtgcagggcattgttcatcttacgtgcaaatgtcccacctgaccggtggtggttgagattaaaattccagtttcttgttgctagggaccacgcattcatctttgtaattgttcagctgattgtggcattcttaggggtgctggtctacaagttttatggagaggaactaagagaaatgtttggttatgat

SEQ ID NO: 2530 - DNA, 370 bp, Gossypium hirsutum
  unsure (1)..(370): unsure at all n locations; Clone ID: LIB3493-005-P1-M1-H1
atctcttcaacgttcacaatgggcgcatttcaccgactcaacttgctccatttcacgctctctttagttgtcattgccgtcaatggccacaatataacggccattctcgaaggttttcctgattactctgtttacaatagtttcctcacccaaacaaagctggccgatgagattaacacccgagagaccatcacttgccttgtcctcaacaatggggctatgtctgccctcacatccaaacaccccctttccgtcgtcaaaaacatcctcagccttcacgttcttctggactactatgacccccaaaagctccacanaatctctgatggcactaccctcaccaccacgctttaccaaactactggtaatg

SEQ ID NO: 2531 - DNA, 258 bp, Gossypium hirsutum
  Clone ID: LIB3493-005-P1-M1-H10
ggtcaacaataaagtctggagatacccctggaaatggtgtggtaccatgagggggccttgacggaccatggaccattcactgttttctgattggttgtgcacaagatgtacttgaaaggtgcgattcaggcataatcaattcactgatgctgaactgcatttcgggaggatgcatgatggagagattcaggtctgttcaaatgactttgtactggattatttagaacactgttgatatagttagctatgggcaggctt

SEQ ID NO: 2532 - DNA, 277 bp, Gossypium hirsutum
  Clone ID: LIB3493-005-P1-M1-H11
acagttgggaagtatacagccactgcatgaggtgaatggaggagaatgtaattgtcagcattgttagtaagggaaacagagggtgaaatacttcaagcaaatcaatttgcaagacaaaccctaacagctgtgataacaaaaccacaaatacttctgaagattctaaaactccatctactggacacaggatgcaaagaacacagcccggaaataccgtcctcataacccgaagatagagggagaaacagaacaaacttgaactaatttgaactgaatc

SEQ ID NO: 2533 - DNA, 351 bp, Gossypium hirsutum
  Clone ID: LIB3493-005-P1-M1-H2
cccacgcgtccgatcctagctctcactcttacttactctgataatggattgcaaaattagttccttgcttactcacgttttcatgctcagcattctgtttgttattgctgggcaagccattgcagcacgtgacatctcgaagaatgatgatcaaatgaaacaacctgaatttctaaaacatgaccgtagtgtgctcattccaggccttggacgagtgttgctgccaccaattttcaaacatcacaatccacacaccatcggcactggcacccacaccggcagcagtggccgccatgttggcagcacaattggtggaaatcgccagcttccaggtagtgatgacacattcgt

SEQ ID NO: 2534 - DNA, 271 bp, Gossypium hirsutum
  Clone ID: LIB3493-005-P1-M1-H3
agagaacccaattattagggtttcaacacagccgatttcgatacttccctaaccctctgttcgaccatttgactaccacattccaccattgaaaccgatggaagatagctagccatgaagtcgtttcattttcctactttaaaccccgccccaaaaggtaagatttttagcccgaaaacctctcttaagcttcgatctcaacgaagaagagatggtctccaatggctcatatgtgcaggtagatcctttcctctttactttatttgctttc

SEQ ID NO: 2535 - DNA, 412 bp, Gossypium hirsutum
  unsure (1)..(412): unsure at all n locations; Clone ID: LIB3493-005-P1-M1-H4
ttttcacaaagggactggaagaagtcgggatttccactataaaaagcaatgccggtttgtttttctggatggacatgcgaccactccttaaagaacaaactaccaaggccgaaacagaactgtggcgtgtgattatcaataaagtgaaactcaatgtctccccaggctcttctttcctctgctcggaacctggctggttcagggtctgctttgcaaacatggacgacaaaactgttgaagtagcacttgacagaatccgagaattcgttcttcaaggcaaggaggaaaacaatcatgaagcagacaagtctcaagctcgggctcagcgttggcgaaagcaaaatctacgcctcagcttctcttcgtctaggttatacgaccagagtctcatgtctncgaccatgatttcccc

SEQ ID NO: 2536 - DNA, 350 bp, Gossypium hirsutum
  unsure (1)..(350): unsure at all n locations; Clone ID: LIB3493-005-P1-M1-H5
ctggtttagattggtacgtgaagcgcactgtccttggaggggtatactcaacaacagagatttacatgctgacagacagttccccagagtttcgtgatacatggctgttcttggataatcgcgtgaaagatgcatttgatttgaagaagacaattcaggaggcaacgtatttggcagaagctgtaggtgctggaatggggagctctttgcaaggctttgttggcaaggtgattcagagataaaaggttaagtgaagagagtatgtatgatcagcttcagactcaaaaacattttctcttttgaggagctatggaaactnttagtaggtcagacttagtgttgataacatg

SEQ ID NO: 2537 - DNA, 310 bp, Gossypium hirsutum
  unsure (1)..(310): unsure at all n locations; Clone ID: LIB3493-005-P1-M1-H7
aaaaaaaatgaagtctcagatctgtttagcctttggaactctggccttgttgttagcttcagctttggccgatgacgtcgtcgtactgaccgaagcgaacttcgataaggaagttggtcaagatagaggagctctcatcgagttctatgctccttggtgtggacactgtaagaagctagctcctgagtacgagaagctcggngcaagttttaagaaggctaaatccgtcttgattggaaaggtggattgtgatgaacataagagtttatgcagcaaaatatggtgttcaaggctacccaactgttcaatg

SEQ ID NO: 2538 - DNA, 300 bp, Gossypium hirsutum
  Clone ID: LIB3493-005-P1-M1-H8
ggaatttcaactcctcgggaaaagttcccccaaacacttcaaaaatttcccttttagggtttcaatggatttatttcatactaaatcgggtttgtccctgggttttactaaatcctccattgcggatgatccgatttcgcttcaaatggacaccacctttcgcttctccgtctcacccgttccgttacagttgttcgaggaaaaagacgacggccaccgtgaaaatcgcatcgaaagtgatgaagaaattaggatttgggggcagtctatgtgtgtgaaaagacaaagggatcctaaacc

SEQ ID NO: 2539 - DNA, 275 bp, Gossypium hirsutum
  Clone ID: LIB3493-005-P1-M1-H9
gccgttaccgtttctaactgccacttcactgaccataacgatgtgatgttgtttggagcaagcgactcttacagtgccgacaagaagatgcaggtcactgttgctttgaaccacttcggtaaaggattggtagagaggatgcctaggtgccgatttggttttattcatgtcgtcaacaatgactacaatcactggttcctgtatgccattggcggcaccagcaaccctacaattatcagccagggaaataggtattcagcgccaggctttggggc

SEQ ID NO: 2540 - DNA, 315 bp, Gossypium hirsutum
  Clone ID: LIB3493-006-P1-M1-A1
ctttgagcaggagatactgatgtggaagaaaaatgggaagctcgatcaatacggtttctctactgcagtagagaacaagttacggaagcctaatggtcagacaaaatggaaagaaccaataagatcagatattaagcattcaaaatcagatgatgatttgaatgctctcctacaggaagaggaggatcttgtaaatgcccataggaaacaagtggaggaaactatgaatattgtcaaagaggagatgaacctgctggttgaagcagatcaacctgggaaccagctggatgattatatatcgagattgaccactat

SEQ ID NO: 2541 - DNA, 470 bp, Gossypium hirsutum
  Clone ID: LIB3493-006-P1-M1-A10
cgaaataaattcctccttcgttctttatttcaactcttgcgaacatttctataatcagtttgatggatctcaaattgggtggggtggttgtatgtgaaattagcagggaggaatgatgaaataattgccatgcagatctattaccggcgggttacttcgcagatccagttgtcaccgaattagcggcgttctcgcccaatggccctgtttctgatgaagctcttgacagagttcgtactatgctaggaggcacaggtggtacgtaattggtctggtcctgtaaatgagcggaatggaacccatcagtcattgccacctatcaagtatctgcacttgcatgagtgcgacagcttctctataggaattttttgtatgccaccttcctctctcatacctctgcacaatcatcctggaatgacagtgttgagcaggcttatctatggctcattacacgttaagtcatatgattg

SEQ ID NO: 2542 - DNA, 380 bp, Gossypium hirsutum
  Clone ID: LIB3493-006-P1-M1-A11
caagctgtctgattatagctgttactcctgcaaattctgacttagcaaattttgatgcgcttcaaattgctggaaatgctgatcttgatggaggttgatccgtgtgaaggcttgactgacgatgacattcgaactgctattcagagaagctcttcaatttatacttggttgattaggttcattggcatcttgtccttatgagagtgtagtttatgaagctttaaactttgcattgtcctctgaggtattagaattcctagttcaaaacttagcaatttgtctttttataaaagacctttgcattttcagtgttgtttaggttcgcaaacaagatgatgtatttggacttctattagtaaaagacttgctgtattttattt

SEQ ID NO: 2543 - DNA, 371 bp, Gossypium hirsutum
  Clone ID: LIB3493-006-P1-M1-A12
ctctttcacaaaggagagcacagaaaaaaggggttcttgttcttgttcaagttattgatcaatggctaatgatgttgaggttggtagtgagttccaagccaaggactaccatgatcctccaccagctccattggtagatgcccaagagttaactcagtggtctttttatagggctataatagctgagttcattgccacccttttgtttttatacatcactgtgttaacagtgatcggatacaagagccaagttgatccagataagggtggtcaagattgtgatggtgttggcattcttggtattgcttgggcctttggtggcatgattttcatccttgtttactgcactgctggtatctcaaggggacata

SEQ ID NO: 2544 - DNA, 403 bp, Gossypium hirsutum
  Clone ID: LIB3493-006-P1-M1-A2
acaagttttattccggttatgaagattctaataagtacaggatgcccacttcgggtgatctgtatagtagaacatttgggatgtgattgcttccagatgttggaacgaagttgttgcttaattggcatttctttgctaataagaatttttgtgcaatcttgcatgcatgccgagtctccttgggcagcctcatgagggataaatctcctgaatccttgtaaccggtgaccaagccagaaaagtttcgtctgaagaaacgtgcaggtgaagcgaacttccgttataatctaatctatatatatagtttgattgtacctcagaagtacaagattaaaaaaaagaaagggtttaactggcagggcaggttgatccactctggtggctagtgttttgactaaatacc

SEQ ID NO: 2545 - DNA, 359 bp, Gossypium hirsutum
  Clone ID: LIB3493-006-P1-M1-A3
gccaattggatggcctcttggtggctaccctggacctcagggtccttactattgcggtgttggtgtggacaaagcctatgggcgtgacattgtggattctcattacaaagcatgtttatatgctgggattaatatcagtggcatcaatggagaagtgatgcccggacagtgggaatttcaagttggtccggcagttggcatttctgccggagatgagttgtgggttgcacgttacattttggagaggattacagagattgctggagtggtgctttcctttgatcctaagccaattcagggagactggaatggtgccggcgctcacacaaattacagtacgaagtccatgagaagtgatg

SEQ ID NO: 2546 - DNA, 405 bp, Gossypium hirsutum
  Clone ID: LIB3493-006-P1-M1-A4
tttcttttgaataaagaatcggttgtttatattttccttccttagggtttttcttcgtaaattctctcacagcttcattttttttataaatcttgtagttacctccatttccttaaaattttttgaaatgcttgttagcagctccgttagcagtctagcatgttcataaaatcttcagttcttatgttgtttcaagcttttgagctctatttccaaactccaaatcactgtcatcaagaatatggaagaatatccagcaagttttccgtgtgttattagttcttacgtttataaatacaaagttggctacttccttgtaatgcaagttccaaaaggagaagtctgcaaggggaaaaagtgaagctgcccagcatgatctatccttgggtagtaagatgcggatgc

SEQ ID NO: 2547 - DNA, 416 bp, Gossypium hirsutum
  Clone ID: LIB3493-006-P1-M1-A5
gaaaatgccaggagctagaagcataggggtggctatggatttctccgctagcagcaagaacgctcttaaatgggctatagacaacttggctgacaaaggggataccctttacatcatccacatcaacaacaactctcttgatgagtctcgcaatgctctctgggcaaaatccggttctcctcttatacctttgacagagtttagagttccggagattatgaagaagtatgatgttgaaactgatattgaagttcttgacatgctcgacactgcttctagacaaaaagagataaacgttgtttcaaaaatctactggggaggagatgccagagaaaaaattcttgatgccattgaagatctaaagcttgattctttggttatgggaagccgtgggcttggaactgttcgaaggatta

SEQ ID NO: 2548 - DNA, 457 bp, Gossypium hirsutum
  Clone ID: LIB3493-006-P1-M1-A6
ctctttcacaaaggagagcacagaaaaaaggggttcttgttcttgttcaagttattgatcaatggctaatgatgttgaggttggtagtgagttccaagccaaggactaccatgatcctccaccagctccattggtagatgcccaagagttaactcagtggtctttttatagggctataatagctgagttcattgccacccttttgtttttatacatcactgtgttaacagtgatcggatacaagagccaagttgatccagataagggtggtcaagattgtgatggtgttggcattcttggtattgcttgggcctttggtggcatgattttcatccttgtttactgcactgctggtatctcagggggacactatcaacccagcagtgacctttgggcttttcttggctcgtaaggtatcattggttcgagccatactttatatggctgctcaatgttt

SEQ ID NO: 2549 - DNA, 452 bp, Gossypium hirsutum
  Clone ID: LIB3493-006-P1-M1-A7
ctctacgacccctacaagtgccccttcatcgagggtgaattcgactgccaaaaatatggtcgacctgataacacgtatctgaaataccgatggcaacccttctcctgcagtctccccaggttcaatgggctgtatttcttgaggaaatggagaggaaagaagatcatgttcgtgggtgactcactcagcttgaatcaatatcagtctttgacatgtatgattcaggcctgggttgcaaattcccagatttcatacatcaaacgagatggtcttacttcagttacctttctgggttatgatgtgaatataatgctgtatagaacgccgtacctggttgacatagtgaaccagaagtatggaagagtgttgaagctggactctatcaagggcggtgattcatggaaaggggtggacatgctgatctttaacacgcggcattggggacccacact

SEQ ID NO: 2550 - DNA, 433 bp, Gossypium hirsutum
  Clone ID: LIB3493-006-P1-M1-A8
ttttattctaaacctctccttttcccttccattagacccaaaatgccgcttcactcggcggtagcattgttttatgccgccgcttctcttttcgccattgttggcgccgaagatccctataggttctacagctggaatgttacgtacggtgacatttaccctcttggcgttcgtcaaacgggtcttctcataaatgggcaattcccaggccctgatattcactctgttaccaacgacaacctcatcatcaacgtctataacaacttaaacgaatcttttctcctctcctggaatggagtccaacaaaggaggaactcgtatgaagacggcgtgtatggcacaacctgccctattccaccaggaaagaacttcacatacatgcttcaggtgaaggatcaaatataggagttctattactacccatcacttggat

SEQ ID NO: 2551 - DNA, 390 bp, Gossypium hirsutum
  Clone ID: LIB3493-006-P1-M1-A9
gcccttgataactctccagcagccgcatccaagtaagagatgggtgaggaagctaaggctgtggttcccgagtcactattgaagaagaataagaggaatgaagaatgggaacttgctaaaaagcaggagcttgaagttgcaaagaagaagaaagttgagaaccgcaagctgattttctctagagccaagcagtatgcaaaggagtatgaggctcaggaaaaggagttgattcaattgaagcgcgaggccaagttaaaaggagggttttatgttgatccggaagctaagcttttgttcatcattcgaattcgaggtattaatgccatgcacccaaggacaagaaagatcttgcagctcctgcgtctgagacagattttcaaatggtgtttt

SEQ ID NO: 2552 - DNA, 470 bp, Gossypium hirsutum
  Clone ID: LIB3493-006-P1-M1-B1
tctgaactcaaacaatgggaaagggttgggcagtgaaggtgatgatgatgagtttggtggtggtggttggtgcgggtgatgagagtgggttagccaaagagtgcagcaaagatttacagagcgtgatgacttgtttgagctttgcgcaagggaagatggagaaaccttcaaaggagtgttgcagttcggtttcgagtataaaagaagaagaaccaaagtgtttgtgttatattcttcagcagacccaggcatccggggctcagaatcttaagagcttaggcgttcagcaagataagcttcttcaacttccttctgcttgccagttgaagaacgctagcgtcactgactgcccaaagcttcttggattagcaccaaactcaccagacgcggctatatttacaaattcttgctcaacaccgacgacgccatccaccgggacaccgtcaagtgcttcagagaatgctgataat

SEQ ID NO: 2553 - DNA, 470 bp, Gossypium hirsutum
  Clone ID: LIB3493-006-P1-M1-B10
cccacgcgtccgcggacgcgtgggcttgatggggtttcgcaccaattccacgaggaggatgttgaagaagcagaagggaggtccttgtggagcaaccaaccctatcgatcaatgctggcgatgtgaccgcaactgggaaaggaacaggaaaaagttggctgattgcgcacttggatttggccgtggtactaccggtggaaaggatggacccatttacgttgtcactgatcctaccgatgatgttcttaacccaagttccggaactttgcgtcatgctgtgatccagaaccgcccactttggatcactttcgctagggggatgattattaggttgaaagaggagctccttatgaccagcaacaaaaccatcgatggtaggggagccaatgtgcatattgcttattgggctggtattaccatccagtttgccaagaacgtcatcattcataacatccatatccataacatct

SEQ ID NO: 2554 - DNA, 442 bp, Gossypium hirsutum
  Clone ID: LIB3493-006-P1-M1-B11
ctaatctatttgatgttttcccgatataggtggttttgaacagaaagaaggaatttcggtgggagaggctggcacttttcatgagagttggtgcaactagaaggagtttgcagttggtggaagcttcaagtggtgaaacttccctagataatttacctagtaggactgatggtgtgtttgacgttgcatatttgttgctaaggcttttaccatctaaagacggtgtggtactaagaagacttataatgactgcggatggagcttcattagtacgagctgcagtttccaaagaagcgaaggccttccgattccaactgtgcaaaatcattgctgatatcctataccaacggatggtcaaagctcttgggcaacttgtgccagctagccagtatagttacaagttaaggcttggccggtgggcatcagaatacagagctacacc

SEQ ID NO: 2555 - DNA, 410 bp, Gossypium hirsutum
  Clone ID: LIB3493-006-P1-M1-B12
tcttagcgtacatgttccttttaagcggttaagactgaaaccaaatgatcatacagtcagatccaaccaccaacctctaacgtctattgcattcattctcttaatgatgaatcctattgaagcaaacggcaatatgtttgaaacccagatggtatatggagttccgacggtggcgactcaaggatttcttcctttacataactctttggttaccgattccttcatccatcgaaagcctacggcagtgatcaaatcggagagtagtttgacgtacaacaatcttcctttacccaggaagcgttccagagattccgctatggtttctttcccttctccacctcacaaaagcaacgaagcttgctctcgtttttcttttcttggccatgatatctcccttcacatggagcaac

SEQ ID NO: 2556 - DNA, 354 bp, Gossypium hirsutum
  unsure (1)..(354): unsure at all n locations; Clone ID: LIB3493-006-P1-M1-B2
gnggaacgaaaaacataaaggaatggatttttatgggcacccatatcgtttttctttgtcttcattttcattgttaagtgatttcattgaaaaagtgaaagattttttcaatttcgctgtctctgccatcattggaaacattttctctgcgatcttaactttcttctttgcgttaggagccatgactggggctttgataggacaagaaaccgagagtggtttcgttcgaggggctgcggtcggngctatatccgnagccgttttctcaatcgaagtcttcgaatcatctcttcttctttggcaatctgacgaatcccggatcttatgtttgctttacttgattgatgtcattgc

SEQ ID NO: 2557 - DNA, 411 bp, Gossypium hirsutum
  Clone ID: LIB3493-006-P1-M1-B3
cgctaattgtttatgcccattctgccctcccataaaaaccgtttgagatattcctagggtttgcatttgcggtttggggtatagggttttagacaacgccaaatcttggatttgaggaatggcgactgcgacgggacaggtgaacgcgaagagaaagccggtgttcgtgaaagtggaggatttgaagcccggtactagtgggcacactttgatcgtcaagtggtggagatgaccccagtcaagacttccgccaggcccaacaggtcccgtgctctcctttctcgacctgtccctccggtccggatcgctgagtgcgtcttggggacgagactggcaccatatcttaccgacgcaacgaacaagtgatttatgacaaagggcaccggatttacgtatgtagatgtatgtaac

SEQ ID NO: 2558 - DNA, 411 bp, Gossypium hirsutum
  Clone ID: LIB3493-006-P1-M1-B4
ctgttacagccatttgtttcacctgcttccttattaggtgctttgtggtggttttatctgcctttgacgcagatgcatcacttgatgttttggaccatccagttctgaacttgatctattacacgctggttgagatcctaccttcagctctagtgctgtatatcttgcgtaaattgcctccaaagagagtatccgctcagtatcacccaatccgttagtcggaatgcatctttgttcgtagaattgtttattcccgtaggaaaacaaaaaaaaagatggttttggcatgtttcaagagggctagttaaatttccagttgagtgagggaatcagagccaggagaagtggaatggttgctgatgcatgcaaaaaaattttaattcttgatgtgaccatactgttttggagctt

SEQ ID NO: 2559 - DNA, 449 bp, Gossypium hirsutum
  Clone ID: LIB3493-006-P1-M1-B5
gaaaaacaagatactgagtgctgtctattgaaatcggtagtcgctgcagatatggcagagggggagaacaaactcaagctctattcttactggaagagctcctgctccttccgtatcagaattgcccttaacctcaaaggtctggaataccagtacatacccgtgaacttgcttaagggggagcaattcagtcctgaattccaaaagctgaaccctattgggtatgtaccggtgctggtggacggtgacatgatcatttcagactcttttgcgattttcatgtatctggaggagaaataccctcaacaccctttattaccatctgatcttgcaaagaaggcactcaatttccaggctgcaaatattgtttcctctagcattcagcctcttcagaatctagctgtactgaagtacatgaggaaaaagaagtccagatgagaaaattcttg

SEQ ID NO: 2560 - DNA, 414 bp, Gossypium hirsutum
  Clone ID: LIB3493-006-P1-M1-B6
catggccctgtttttatccaaaaaggagaaaaaatcagtcgaatcttgcctcgctccagtggttcctttaattgatcaagaattagtagttgttttcgaaaaagccatgtgcgaccttccatgatacgctccaagtcatcctcgtcttcaaaaactattgaaaacagtgcaaatcagtgttggattttctgccggagttactagcgaactctttactgttaactggatcagttcttcttcaaggaaagctaattccttttctgcttccataccctcaactcaccactcgtacgctgcctaaccacagtagccgctgtttctttgggatgctcagagagcactcttgactttttagggttaaattagagttgaattaatttccaacctatttttgggttttatttttaatgttct

SEQ ID NO: 2561 - DNA, 365 bp, Gossypium hirsutum
  Clone ID: LIB3493-006-P1-M1-B7
tgaaatgaggctttgccaacaacccaaaggagcaagtgattaaagctttatgttggcaccttaaagtccagggttaaagtcctgtcgtcccctccccttaaattgtaatgcacaaattcattgagaaatgcaaatgtggagcttcagtaatgcttccaaagattgagaaagctaagcgaataagggctgcaatggctcaacaggcacaaactattgctcccaccattccaggacttaatccactggaaggttcaaacttgaatgaggattatggatatactgttccatcaaagcctcagaatatgggtcttcaagttgcaaatcagactcctgcaactggcactttgaagacgcctcgcacattg

SEQ ID NO: 2562 - DNA, 356 bp, Gossypium hirsutum
  Clone ID: LIB3493-006-P1-M1-B8
cggacgcgtgggtgaataaaagagatttaaagtaaataaataaataaacagctagcacattgtaattcaatcatatatcaagctgcttggttattctttattttctttctctttgtgtagaatccgtagtttctataatctatatataaatctatgaagatttctatgaagattctggcgccatagcttgtatattcatggccttctttttccctaaaagaccattggcatcaagtttcatggtaaggtccttaatcgttcgtttgagttcatccatataagctctaagtatctcacaaagatggctggcgccgcacattgggtattcataaccttactggtttcaatatgtttat

SEQ ID NO: 2563 - DNA, 447 bp, Gossypium hirsutum
  Clone ID: LIB3493-006-P1-M1-B9
cggacgcgtgggcggacgcgtgggcggacgcgtgggctttactctgggcttcaacctaccatgctggggagtgcttggatcctgtggctgttacagaagctaaggctaaaaaaagagcaaaaaagttggctggcatttctcagtcactgtcaaagagtgagctggctgatcgtacttcagctggcaagtctgatgcccggccagtggagagtagttctactggtactgaattgatcggtcccagacagatggcagtcgaaggattcaaggcacaaagtgagatggttattgacagtctagacagactaattactgcatgggaagagaggaaagagtctgtagtagtccgagggtgttcacctaagccttaattttgttatggggcttatgaagaaacacccctcaatcataccattcatgatatacattacaaatgaagacaaacac

SEQ ID NO: 2564 - DNA, 385 bp, Gossypium hirsutum
  unsure (1)..(385): unsure at all n locations; Clone ID: LIB3493-006-P1-M1-C1
gngcaagtcaatgggtgaagcctgatgccacaatagcaatacaccgcatcgcatgtctcgttcggtttagccaactccacgcctctctgtttcagagctttccctaagtcatccacacaggtttccgagtcatccggcagcaatggcatgtcataagattgggtacgcccctcaaccgctggcactactcttccaaccccaccaagggcggtggcggagtaagcggcgtaaagccatgcagcgagaacaggacagcagcggctgcggtggagctcactcgccaccccattgtttatcttagtgccacaagcgttcttaacgctgtgaaagagttgttcaggtaagtcaagtggacaaccaacgacattggattgctctggaaatg

SEQ ID NO: 2565 - DNA, 478 bp, Gossypium hirsutum
  Clone ID: LIB3493-006-P1-M1-C10
ccttgcttctctcatggtacaatcctcttcccgctgagccccctttctcctcggtccacagagacaaaatggaatgtaggactaggactggcgccaacagttaatcacggaagaaaggactcactgagccgggatcactaactaatactaatctaatctaactaatactaatctaatactaatagaatactaatctaatactctaatactaatagaatagaaaaaatagaatagaaaatactaatataatagaaagaaaagaactgtcttttctgtatactttccccggttccgttgctaccgcaggctttacgcaatcgatcggatcatatagatatcccttcaacacaacataggtcgtcgaaaggatctcggagactcaccaaagcacgaaagccaggatctttcagaaaatggattcctattcgaagagtgcataaccgcatggataagctcacactaacccgtcattttggat

SEQ ID NO: 2566 - DNA, 380 bp, Gossypium hirsutum
  Clone ID: LIB3493-006-P1-M1-C11
gcatgtgccgtggattagcgtggttaaattgcaggccacctccaacaacatctaatatttctttttaagatagctgagaaatgaatcacttgactctagaaactgaagatacttttgcaagcttgcttgagcttgccgctaataatgatgtcgagggctttaaacgatccatccaacgtgacccttctggtgtagatgaagtagggctgtggtacggtcgtcccaagggctcaaagcagatggttaacaatgaaagaacacctttgatggttgctgctacatatggtagcaatgatgttattaagctgatcctatcttcatccgatgctgatattaatcgtgtgtgcggccatgacaaaagcactgcactccactgtgct

SEQ ID NO: 2567 - DNA, 430 bp, Gossypium hirsutum
  Clone ID: LIB3493-006-P1-M1-C12
gctggattggccgaccaggtacaagattattgtcgatgcagctgaggggctttcttatttgcaccatgactgcgtgcctccaattgtgcatagggacgtcaaatccaacaatatcttgttggatggggactttggtgctagagtggctgattttggagttgccaaggtagttgatgcagctggaaagggtgttaaatcaatgtctgtcattgccggatcttgtggttacattgctccagagtatgcatatacgctgtgtgtgaacgagaagagtgacatatacagcttcggtgtagttatactagagttggtcacaggcagactcccaattgacccagagttcggagagaaggacctattaaggtgggtctgcaccactctagatcaagaaagggtggaccatgttctcgattccaaagctcgatccatg

SEQ ID NO: 2568 - DNA, 454 bp, Gossypium hirsutum
  Clone ID: LIB3493-006-P1-M1-C2
cagctcctgaccctcatgctggaactcccccttcaggttcacatggcacaccaccatcttcaggaggtggatcacctccctctcatggaaccccgtcacatggaggtggttaccacccttcaccaacaccatcaacgccttcgggtggaaattgtggaactcccccacatgacccttcaactccatcaacaccatcacacactccttctcatggtactccaccatcatctggaggtggtagtcccccatcgtatggaggaggcagtcccccatcgtatggaggaggcagtcccccatcatacggaggtggcagtcccccatcatatggaggtggcagtccaccaactactcccattgatccaggaactccaagcattccctcacctccattctttcctgctccaactccaccaattggtggtacatgcgatttctggaggagtcaccccacact

SEQ ID NO: 2569 - DNA, 401 bp, Gossypium hirsutum
  Clone ID: LIB3493-006-P1-M1-C3
caaacatggagagaatcatgaaggcccaggctttgagggataacagcatggctggttacatgtcaagcaagaagacaatggagatcaacccggagaaccccatcatggaagagctgagaaagagagccgatgcagagaagaatgataaatctgtgaaggaccttgttctccttctcttcgagactgctctcctcacctctggcttcagccttgatgagcctaacacctttggcaacagaatccacaggatgctgaaactcggcttgagcattgatgaggatgcaagtgaaggtgaaggtgatgctgatatgcccccattggaggatgctgatgccgaaggcagcaagatggaaggaggtgattaagcctaacatgtttttaataagatcagtagaattatc

SEQ ID NO: 2570 - DNA, 446 bp, Gossypium hirsutum
  Clone ID: LIB3493-006-P1-M1-C4
gaatttggtcatactttggatgctaagtaccttccccgtggcgagtcatcagtgactggccctgtcgtcagacttttcaagccttttgatgaactctttgttgacttcaaggattttaatgtggaagctctagagaagtttgttgaagaatctagcattcctcttgtgactctctttaacaatgacccaagcaatcaccccttcattatcaaattctataacagtccccttgcgaaggctatgttgtttgcaaatttgagcaatgaaggagttgattccttaaaatctaaatttcgtgaagttgctgagcaatacaaaggacagggtatcggtttccttttgggagatcttgaggctagtcaagctgccttccagtattttggagttcaagaaagccaagtacctctcatcatcattctggagaatgattgggagaagtttttgaa

SEQ ID NO: 2571 - DNA, 387 bp, Gossypium hirsutum
  Clone ID: LIB3493-006-P1-M1-C5
gctgagaggaacattgagatatctccttgggaatctgcatgactggaaggttgaaaatgctgtctcttaccaggaactgcccatgattgatcggcatgcactgtttcagcttgaaaatgttgtaaagaatataagggagggttatgaaaattatcagtttttcaaaatattccagatcgtacaacggtttgtgaatgttgatttgtcaaatttctactttgatattgccaaagatcgactttatgttggcggcacgacaagttttacaaggagaagttgtcaaactgttcttgctgcgcatctcctttccctatccagggtaattgctcctattttgccacatttagcaaaaggatgtgtggcaaaatcttccttttcagtatacca

SEQ ID NO: 2572 - DNA, 425 bp, Gossypium hirsutum
  Clone ID: LIB3493-006-P1-M1-C6
agctttcagcaatggagtggaagctctgattcaaaagggatacaagaagatcactccattttttatcccttactccatcaccaacatgggatcagcattactagctatagacactggcttaatgggacctaactattccatttcaactgcttgtgcaactgcaaattactgcttttatgcagctgccaatcacatcaggagaggtgaagctgacatcatggtagctggtgggaccgaggctgctgtcatgccgactgggatcggcgggtttatagcttgccgggcattgtctcaacgaaatgatgaacccaagagggcttccagaccttgggacaaggaccgtgatggtttcgtcatgggagaagggctgtgtgtactggttatggagaacctggatcatgctatgcaaagaggggctaacatca

SEQ ID NO: 2573 - DNA, 435 bp, Gossypium hirsutum
  Clone ID: LIB3493-006-P1-M1-C7
cccacgcgttcggttaactcaatgaaagtgatggtgaagaaattgcacagagagggattcgaggttcttttggaagtagtttttacacatactgctgattctggagctcttcatggaattgatgacagttcctattactacaagggaagagccaatgatctagattctaaaagttacttgaactgtaactatcctgttgttcagcagttggtattggagagcttgcgttattgggtaaccgagtttcatgtagatggattttgttttataaatgcttcatctctcttgagaggcgttcacggtgaacagctctttcgtgctcctttggttgaagcaatagcttttgatccacttgttgcggagaccaaactaatagcttattgctgggatccacttgaaatgatgccaaaagaagtacggtttccacattggaag

SEQ ID NO: 2574 - DNA, 490 bp, Gossypium hirsutum
  Clone ID: LIB3493-006-P1-M1-C8
caattcttgattcgctaccatctttaccatgagcataagtgcatcaatacattgagaaacaacatgtagcatctctattgcacgaattctttaatatgctcatgtttgatgcttcatcaataggaagcgttatgtgagtttgacattaatacatcataaaagggaatactacccttgtgattcttgcaattggagtaggaagaagaagaagtgcaatccggcggttctctctggtttgactgacgatacatctaacgtagcccttctcaatgtactcttttgatatctatattctgaaaacctgtcttcacttgaacagtacacaataatcctctagattgttgagctatagtaattagagaagaagatggaaaatcgatgtggtttagggtgatgtcaaaaagaattgcatttaaatatgaatataatgatataattaatattttaaagaaaataactaaatgaaacaaaaaatatttaaacatgaaat

SEQ ID NO: 2575 - DNA, 405 bp, Gossypium hirsutum
  Clone ID: LIB3493-006-P1-M1-C9
gtaaggtggatatgttggaaggtgtttccattgttcgatccgagaaggttaaggatgagattgttttggatggtaatgacatcgaacttgtatcccgatctgcagctttgataaaccagaaatgccatgtgaagaacaaggatattagaaagttccttgatggtatctatgttagtgagaagggaagggtcgctgaagaagaatgattactatctccttgaatcatagttatagtgctgctttattttttttgtcgtggtaatatcttgggactccgttttttgtctcgtctttcctgtttccctggattgcaactgttacagaggacaaggatgttatctttatttgtttgcagaattttggatatctggttaatctttagtactctaattattcccccatttt

SEQ ID NO: 2576 - DNA, 402 bp, Gossypium hirsutum
  Clone ID: LIB3493-006-P1-M1-D1
gaagaaaagaaaaagaagaagattaaggaggtgtcgcacgagtggtctttggtgaacaaacagaagcccatctggatgaggaagcctgaggagattaccaaggaagaatatgctgctttttacaagagccttacaaatgactgggaagagcatttggccgtcaagcacttctcagttgaggggcaacttgagttcaaggctgtcctctttgtccccaagagggctccttttgatctctttgatacaaggaagaagcccaacaacattaagctctatgtgagacgtgtctttatcatggacaactgcgaggagttgattcctgaattcctcagctttgttaagggtattgtcgactcagaggaccttcctttgaacatctcaagaagaatgttgcagcaaaac

SEQ ID NO: 2577 - DNA, 404 bp, Gossypium hirsutum
  Clone ID: LIB3493-006-P1-M1-D10
gttggatacggtcacctcggggatggaaatttgcaccttaatgtttctgctccagagtacgatgataaaattttagaacaaattgaaccctatgtctatgagtggacatctaaacaccgagggagtatcagtgctgaacatggcctgggactgatgaaagctaacaagatttattacagcaaatctactgaaactgtacaaacaatggcttctataaaaaagttgcttgaccccaatgggatactcaacccatataaagtccttccacactcactcaattcttagagccgaggctgggaaaacaagcacaaccgtgaagtcttctctattttttccacgttcagtgactaggatttcgaatgtgcacaagaaagaagtcatgaatggaggttagctgaaatggg

SEQ ID NO: 2578 - DNA, 395 bp, Gossypium hirsutum
  Clone ID: LIB3493-006-P1-M1-D11
gagcagtccctaggaacaattaaaaagaaccgaatgataaacacagattaagacagaagcatggccagccagctcgtaggaacaaagagagcttgtgtagtgggtggcataggatttgttgcctgattgctggtcaagttgttgctagagaagggttacgccgttaacactacagtcagggaccctgacaaccagaaaaagatctctgaccttgtaacactacacgagttgggagacttgaagatctttcaggcagatataactgatgaagggagctttgatgcccctattgctggttgagaccttgtcttacatgttgcgacacccgtttactttgcttctgaagattcatagaatgacatgatccaacccaccacttaaggagtggtgaacgt

SEQ ID NO: 2579 - DNA, 437 bp, Gossypium hirsutum
  Clone ID: LIB3493-006-P1-M1-D12
gaggacccggaggatagcatcaatgcagcaatgctgaaggacggtctcgctaggttggagaagaggaagaaatgggaatcgaaggagagaaaagtgatgcttaataaattggaagagtgtcaggaggaagcgaaaactggtcggcgtggaatgtggcagtatggagatgtggagtcggatgatgaggatttacttccgccagttgcggctaagaaaaccggaggtcggcgttaggtattgtaatttttttatcaatcactttttggggttaaacatctaaagagttctaagttataggtgtggatcattctcgtttgaagagttacaagagctccccgaaagaaaaatctcaaccataacatgcttaaattttgactctttttttaaaatctttttttttttttacattacgagagacaatttctttaatacatgtt

SEQ ID NO: 2580 - DNA, 364 bp, Gossypium hirsutum
  Clone ID: LIB3493-006-P1-M1-D2
ctctgcttttcttctcaacttttttttcttcttttaatccttcaaattggccaagttgctggaaaagaaagactgagaagaagaacaataataaaagaggaaaaagaagacttaaaaaggcatcatcagtgaaaattttcgagcaactagagacgctgaataaaacgaagaaaacccaaattgacacaggaaatcagattccattgaattgcagatctcttttagcttttgctagttcttgttttgtatatatgggagcagtggttgtctaggatgctgtgcgaggcccattttcaatcccttggtgaatgagtcatcaaaaggattaaaatttcaaggacagacagtgagtaaacccaatata

SEQ ID NO: 2581 - DNA, 392 bp, Gossypium hirsutum
  Clone ID: LIB3493-006-P1-M1-D4
gtgcctgtatggtacaacatggtcaatcaaggtcttgttaatgaaccagttttttcattttggcttaaccgcaatcctgaggatgatgttggcggagaagtggtttttggcgggatggatccaaaacattacaagggggaacacacttatgttcctgtaacacagaaaggatactggcagttcgatatgggtgatgttctgattggtgaccaaacaactggactttgtgccagtggctgcagtgctattgttgattccggaacttccttgttgactggacctacggctattattgctcaagtcaatcatgctattggtgcaacaagggttgtagtcaagaatgcaagactgtagtttcagaatacggagaaacaataattgacttgctatta

SEQ ID NO: 2582 - DNA, 402 bp, Gossypium hirsutum
  Clone ID: LIB3493-006-P1-M1-D5
gccaaaactttatcttcagcagaactctcccactccctctgccaaaatcttcaccttttaaagccttcaactttccaaaggaagccatggaaaggcttctttactcctcttctccaactcctttggagatctctcgaaagccatctccttctctctctcgactcgccagattcgactctcctactctcggcttcgttccttcgctccctcgcccccaactcaggcgattcatttctatttcatgcgaggccgataataacccatctcacttctcttatcctctatccaatcccagcaatgaattgccttcactcggttctccgcgagtcgactcggcaaatgggtcaacacccacgtccaattttcttaagcttgttgcaattaaagcttctgcacaaagaa

SEQ ID NO: 2583 - DNA, 493 bp, Gossypium hirsutum
  Clone ID: LIB3493-006-P1-M1-D6
aatggccgctgcagctccacccccaccaccatccgccgcccctgaaccttccatggcaccacctgaaacaaccccgataggccaccccatcttcaccaggatccgcctagccaccccttcagacgtccctttcatccacaaactaatccaccaaatggccgtctttgagcggctgacccacctcttctccgccaccgaatcttccctatcttccaaccttttcctctcccctcctttccattcattcacaatttttctactcgaactttcctcttcccccattcctcctctcctttccccttcaccatctttcactcccatagaaaagacattcaacttcgacatccccttaaacgaccccgaaagtgatgccttctcgatctattacgggaatcagcaagttataatcgggggggtcgtgttcttcttcccaaactactcgacatttttagggaaacccaggtttacgttgaggatttgtcgtcaggaatgc

SEQ ID NO: 2584 - DNA, 215 bp, Gossypium hirsutum
  Clone ID: LIB3493-006-P1-M1-D7
cttttactcacggcataaagaaaacctcaaatacctagaggaatagtgaacttgtccggctgtcatagatatgtaatttccttctcctttgtttctttggttatactattgttgtatttgaatgttgtttttatccaggaaaagtaagttatttgactcccaatatcatgtaagaaactctgcttagaaaaaaggagctatggaatatgtataat

SEQ ID NO: 2585 - DNA, 375 bp, Gossypium hirsutum
  Clone ID: LIB3493-006-P1-M1-D8
cagaaagctcttgaaatggcagattttgatcctaacgatcttgacctaatcttgatgtgcacatctactccagaagatatttttggttctgctccacagatccaaagagagcttggctgcagaaattctcctttagcttatgatattacagctgcttgtagcggatttgtgctgggtctgatctcagctgctagtcacattaggggaggtgggtttcgtaatgtgttggtgatcggtgctgatggtctttctcgatttgttgattggactgatagagggacatgtatcctctttggggatgccgcaagtgctgtactagttcaagcctgtgatgcttgagaggatggttattaagctttgacttgcatagtgatg

SEQ ID NO: 2586 - DNA, 272 bp, Gossypium hirsutum
  Clone ID: LIB3493-006-P1-M1-D9
cgacaagaatcggttcttttaagcgcggttgatgagaatcaattcaacacaatggttcaaacatacatgatagataaagccaaaggaagaatgagaatccgaatgaaagtaagcttagcattagtagtcgtcgttgggtgcatcgccatcggcacggtagccgtccattttttggaaaatttggattgggttaatagcttttatctcgctgttacatcagtgacaaccgttggttatggtgatttttcttttgaaacgttaatggggaggtg

SEQ ID NO: 2587 - DNA, 393 bp, Gossypium hirsutum
  Clone ID: LIB3493-006-P1-M1-E1
atttcaccacaaaacgcaaagaaggcaatccattttccccgagtaaaacgccaaagaaaacaaaaaatatgagagaaatcttgcacatccaaggtggtcaatgtgggaaccagatcggggctaagttctgggaagtcatatgcgacgagcatggagttgacaacactggaaaatataatggtgactccgaccttcagttggagcgcatcaatgtctactacaatgaagccagtggtggaaggtatgtcccacgcgctgttctcatggatctggagccgggcactatggattccgtcagatctggtccttttggacaaatctttcgccccgataacttcgtcttcggacagtctggtgctggcaacaactgggcccaagggtcattacaacgga

SEQ ID NO: 2588 - DNA, 506 bp, Gossypium hirsutum
  Clone ID: LIB3493-006-P1-M1-E10
cttggttctgtagaaattttccttagtcgtcactgtccactttggtatggttatggtggaaaactgaaatggctcgagaggcttgcttatatcaacaccattgtttaccctttcacctcgatccctttactcgcctattgtactattccagctgtttgtcttctcaccggcaaattcatcattccaactctaagcaaccttacaagtgtgtggttcttggcacttttcctctccatcattgcaactggagtgcttgaacttcgatggagcggggttagcatccaagactggtggcgcaatgaacaattctgggtgatcggaggtgtctccgcccatctttttgctgtcttccagggcctcctcaaagtcctagctggagtagacaccaacttcaccgtaacagcaaaagcagcagacgatacagaattcggtgaactttatctcttcaaatggacaactctcttaatccctcccacaactctgataatactgaacatggtcggagt

SEQ ID NO: 2589 - DNA, 455 bp, Gossypium hirsutum
  Clone ID: LIB3493-006-P1-M1-E11
ttatcaccactggattgacttcccatcaatctggaggaccaatttttgcagagggagaaccaccaaagcttgccgaccccttcgattttggaggtggaattgtgaacccaaacagcgcggccgatcctggcctggtttatgacatgaatacagagaattatgtgcattatctttgtgccatgggttacaataactctgatatcttccagctcactgaacatccagtagtttgcccctccaaacaaccttctattctggacgtaaacctcccatccataactatcccgaacctcaaaaagccaacaatttttaccagaacagtcacaaatgtgggacctgtcaacttcaaatacaaggctagcgttgagtttgcatctggcataaacgtagctgttgtacctgaaacattgatctttaactttaggactaatgccatcttcttttttttgatgatt

SEQ ID NO: 2590 - DNA, 454 bp, Gossypium hirsutum
  Clone ID: LIB3493-006-P1-M1-E12
ttttccttcttttttgctttcatcatctctcattgctttcttttctctaacaaatactggataatagatatatgggtcctaacacctttgttaagctattaatatattttatttatatatttatttgtttgtttgttttgagatttgaagattgaaattttgaagcaggtttagggttcttatgaacttcccaaattggaagctcaaaaacaggattttgttttttgttggggggtttttcagctttatttagtagatctaattatgggttttgattcttggaaaatttggatcatgggaaaacgtgggcaaattagaacttagtttggaatctgaagtttccattttttttttctattgctatctttagatttcaatttatgctgcttcggaatctttagatttttttccttccattttttgcctatatgttcatttacttatttactggggg

SEQ ID NO: 2591 - DNA, 345 bp, Gossypium hirsutum
  unsure (1)..(345): unsure at all n locations; Clone ID: LIB3493-006-P1-M1-E2
cccacgcgtccggttccaagaaatccttcaaattgtaattttaattttccccgagaggtctaggttccataaaagtttgtaggaagcactagatttggtctgtaatgcataagcagtaggatcttccaaatttttttgtaaaagtttataggcactgcgaaccaaaaactcctccgaagtctctccactccataccagaaaatcttcatgagcttcttgagcaagcgaaatctgaaggatattaacagcgtctgactgcaagaaggtctgagagttttcttctaattgcaaaaccgtccaaattgnggaccaagtcaacccaattttcggctgtacatggatttc

SEQ ID NO: 2592 - DNA, 357 bp, Gossypium hirsutum
  Clone ID: LIB3493-006-P1-M1-E3
cgtcaagaacgttgctgttaaggatctcaagcgtggttttgttgcttcaaactctaaggatgatcctgcaaaggaggctgccagcttcacttctcaggtcatcatcatgaaccaccctgggcagattggaaacggatatgccccagtccttgactgccatacctcccacattgctgtgaagttttctgaattgctgaccaagatcgacaggcgatctggaaaggagcttgagaaggagcccaagttcttgaagaatggtgatgcagggatgataaagatggttcccaccaagcctatggttgtggagactttctctgagtacccaccccttggacggtttgctgtcagggacatgcg

SEQ ID NO: 2593 - DNA, 427 bp, Gossypium hirsutum
  Clone ID: LIB3493-006-P1-M1-E4
gctatttataccattttagaagtgaagggatgaagttgagattgatctcttttagggttcttcaattgcatgaattgaagctcattatggatgtttactttccaatatctgtggtggtaatgaaccgaagccacctaatgagaagaatattaggtggcagctctctttttccttttttccgttttaacctccgatatcagaattatctgtgataatcccattgacaattgaatcgtatgttttagcattgcaaaaatttaggcttttttgttttgttggtagaagtaaaattggtttggttgattagtgtaatagcatgagacaaaacttatttagtaaactagcactaatagtttgtaataacattattgaaatggttcattggttggtggtaaaaataatgagtaaatagaactgaagtataatt

SEQ ID NO: 2594 - DNA, 133 bp, Gossypium hirsutum
  Clone ID: LIB3493-006-P1-M1-E5
gatgtagctcagcgcacacacaggacccttagagggttgccacaatacatatgtctgacatggtacggatacgagcacacatcaaaatacagccaatcatatgcccaatcaaatgctactgacactaaatcca

SEQ ID NO: 2595 - DNA, 509 bp, Gossypium hirsutum
  Clone ID: LIB3493-006-P1-M1-E6
cccggtgttggcattcacgaagatcatgttgtcccaaaaggtgctgaaattggtactcttggttttggttttgaaggtggtcctgataaatgttgttcttctggatgttccggtaattgtaatcctggtggtttcgttctaccatttcctcaaattccagaaatcccaagaattccagaaattccacaaatcccacatatcccacaaatcccacaaattccactaatcccacagatcccacaagtcccacagatcccacaagtcccaaaaatcccactaatgccaggacagtcggtatgtgagagtggagagtgttgccgtcagggttgtggtgggacttgtgctgagtgtggtcagcccaagtgcgcatcaagatgttgccaggctgaaactgtatagagcaaagggatagaagaggttatggacagtgtacccagtccaccaaagtagagagatgataccatattaaaatgaaataacgaggaagaagttgttgtcgtcttattaat

SEQ ID NO: 2596 - DNA, 470 bp, Gossypium hirsutum
  Clone ID: LIB3493-006-P1-M1-E7
gttaccttccgtggacctagtgacactcacctagacagtctagtgggccaagcattgtttggtgatggtgccgcagctgttataatcggggcagaccccatgcccgaaatcgagaagcccatgtttgaactagtctcagtagcccaaacgatcttgccagatagtgatggtgcaattgatggtcaccttcgtgaagttgggcttacatttcaccttcttaaggatgttccggggcttatttcgaagaatatagagaagagcctggtagaagcatttcaaccattgggcatatccgattggaactcccttttttggattgctcatccaggtggtccagcaatattggaccaggtagaagccaagttagcacttgagccagagaagctacgagccacaaggcacgttctttcagagtatggtaacatgtcaagtgcttgtgtttattcattttggatgagatgaggaagaaa

SEQ ID NO: 2597 - DNA, 418 bp, Gossypium hirsutum
  Clone ID: LIB3493-006-P1-M1-E8
aaaggtcatatattttgcgaattcaattaatgggttttagaagaatgggttggcatgagttactatgggtcggaaggctgcttgttcttatgcaactgcttcatggggtgtttggttggggaaaggacggtcattttgctgtttgcaagatagctgaggaatatcttactaaagatgctctggctacagtaaaggaactgctccctgattccgctggaggtgagcttgcatctgtatgctcctgggctgatgatgtaaggtggcactatcattggtctagtcccttacactatgttgacaccccagatttcaagtgtaattataaatactgccgggactgccatgatgctgctggacataaggatcactgcgtaactggagccattttcaactatacaaagcaacttttttcagcata

SEQ ID NO: 2598 - DNA, 403 bp, Gossypium hirsutum
  Clone ID: LIB3493-006-P1-M1-E9
ggtctcttcataaccacccaatgggtcgtgtcatccgagctcaacgtaagggtgcgggttccgttttcaagtcccacacccaccatcgcaagggtgccgctcgtttccgcagtctcgactttggtgaacggaatggctaccttaaaggtgtcgtcacggaagttatccacgacccgggccgtggtgctcccttagtccgcgtcgtcttccgtcatccattccgttacaagaaacagaaggaactgttcgttgctgccgaaggcatgtacactggacagttcgtgtactgcggtaagaaggctactcttatggtcgggaacgtgttgcctcttagatctatacctgaagggagcggcgtttgcaacgtcgaacaatacgttggtgatcgtggtgtttcgctagg

SEQ ID NO: 2599 - DNA, 324 bp, Gossypium hirsutum
  Clone ID: LIB3493-006-P1-M1-F1
agagaagtatgccaacgaccagagctctgggaatgttcagggctatggtagcaagcttgctaataatgctagtgggcagcttgagtgggaggactacttcttccatctaatttttcctgaggataagagagacttgtcaatttggcctaaaatccccagcgagtacactgaagttacaagtgagtatgcaaggcaactgcgagccctagcgagcaaaatactttcagcactatcaatttgcttgggattagaagaaagaaggctagagaaggaagttggtggcatggaaaagcttcttcttcaattgaaaatcaattactaccc

SEQ ID NO: 2600 - DNA, 418 bp, Gossypium hirsutum
  Clone ID: LIB3493-006-P1-M1-F10
gttggatcgatggtctcaaagctcatgctgctgcaaatgtgaccgataagatgatgcttaatgcttcaaacatcttccctcacaacactccgaccacgaaagaagcatactattataggatgatcttcgaaaggttcttccctcagaactcggcacgattgaccgtcccgggaggagcaagtgtagcatgcagcacggccaaagctgtcgaatgggatgccacttggaagaacaacctcgacccgtcgggcagagcagcacttggagtccatctctcggcttacgactccgagacacctctagataacaagccgtccaagattattgagtcaataccgttgatgatggagattcctggagttgccataacatggtaagtgccatgaaaattgaaagcaaaatgtgtgaaatttaatga

SEQ ID NO: 2601 - DNA, 424 bp, Gossypium hirsutum
  Clone ID: LIB3493-006-P1-M1-F11
cggacgcgtggggcatttcatcatcagcgaaaaaaagggaattttagtcttcaggggaacgatcgaacgatgtcgtacctactaccgcacctgcactcaggatgggccgtagatcaggccatcttggcagaggaagagcgtctcgtcgtcatccgattcggccacgactgggacgaaacttgcatgcagatggatgaggtgcttgcttctgtcgctgaaacaataaagaactttgctgtgatttatcttgtagacataacagaagtacctgattttaacacgatgtatgagctttacgatccatcgacagtgatgttctttttcagaaacaagcacattatgattgatcttggcactggcaataacaacaagattaactgggcactcaaggacaaacaggagttcatagacatcattgagactg

SEQ ID NO: 2602 - DNA, 359 bp, Gossypium hirsutum
  Clone ID: LIB3493-006-P1-M1-F12
gttttacgtctaattgtatctctccagcaacgcacagtagcaccaaatttccgtacgtccaaacttttgatccattatcaccttctctgatcttccctctactatcggaggtttgttgtggttgttagacttgaagatggtgtcggacgcgagcaagaagaaggctgctcagaagaaggctgctgccgctgcgaagagaggagggaaggctgctgcagccgctgcatcttccaaggcggcagctgcggcgaccgcggagaacggcgttgataaggtttctgataaagttagtatgctccagatatccgatcggacctgtaaccgtgttctctgctcgcatcctctttcccgagatattc

SEQ ID NO: 2603 - DNA, 378 bp, Gossypium hirsutum
  Clone ID: LIB3493-006-P1-M1-F2
caagtacagaccaaggggacggggcaatggttattttggttcaggcaatgatatcatggacggttttaatgaattgaacaggggacctagggctaaggggcctaagaaccaaaagggtgcaacacctatcacagcatctactaaggggcaaaatattccctcagatggaaccaaggatgaggaaaaggcatatgttgttccagaccgtgaacagtataacctagaagaattccttgtggattatgacgatgccaagttctttgttattaaatcatacagcgaggatgatgttcataaaagcatcaagtacaatgtttgggcgagcacaccaaatggtaacaaaaagcttgatgcagcttaccaggaagctcagcagaa

SEQ ID NO: 2604 - DNA, 390 bp, Gossypium hirsutum
  unsure (1)..(390): unsure at all n locations; Clone ID: LIB3493-006-P1-M1-F3
cggacgcgtgggtgcagctgtcgtcgttgaccgcaatctgtagccaaagtaacgcgccatggctcgaacttggcttcacctaacttcctccattattgtctgtgccctgatctgcttcaatttcttcaccgtcgacgcaaaagatcatcatccacggccgatgctccttcctctgcaactgacctcacgcaatcattcccagcagcgccacttggacaatatccgccgtcatctgcagcaatcgggactctcttcttccactccaaacgctcgcatgagactntatgatgatctcctctccaacggttattatactactcggttatggattggaacgccacctcaggaatttgctcttatcgtcgacacccggaagtacttgtaactacg

SEQ ID NO: 2605 - DNA, 413 bp, Gossypium hirsutum
  unsure (1)..(413): unsure at all n locations; Clone ID: LIB3493-006-P1-M1-F4
cgccgaatccgatgaatttgaagacaagatgaaggagttggagagtatttgcaaccccatcattgctaagatgtaccagggtgccggcggtgacatgggtggtggcatggatgaggatgttccggcaggtggaagtggtgctggtcctaagattgaggaagttgactaaaacattgattttcttcatctggtttctctattgtgttctcttatgttttttaggatttaaaccgtttggttntgttgtttggtttctaatcggattgaaatgaacttttatagggtttgttccttttttggaaacaggtcccttttgaacttcctaaagatattaagacttctgtttatgaaatgctctttacttttttattttagttgtgtttgaaacatatataaatgaagttcttttctag

SEQ ID NO: 2606 - DNA, 412 bp, Gossypium hirsutum
  unsure (1)..(412): unsure at all n locations; Clone ID: LIB3493-006-P1-M1-F5
gaagaaccttcctcttctgctaaggattattttcatggaccttccatggctcctaattctgataggagatccaattccggttacggaaatgggttttcggggttaacccttgattctactggacatggagggaaacagagttcgaggtccgaccaagaaagaaggaaaggaatcccatggactgaagaagagcataggttatttctacttggtttagacaagtttgggaaaggagattggagaagcatttcaaggaactttgtgatatcgagaactccgacgcaggtggctagccatgcacaaaagtattttatacgcttaaattcgatgaatagagaccggcggcggtccagcatccacgacnatcacgaggttaacaatgggggatcgtctcatcaagcgcctatcaccg

SEQ ID NO: 2607 - DNA, 457 bp, Gossypium hirsutum
  Clone ID: LIB3493-006-P1-M1-F6
ctcaaggccagacgacgacatggggaggagacctgcaaggtgttatcgccaaatcaagaacaagccatacccaaaatctcgatattgccgtggtgttccggatcctaagatcagaatttatgatgttgggatgaagaaaaaaggtgttgacgagttccctttctgtgtccatcttgtcagttgggagaaagagaatgtctcaagtgaggcgttggaggctgctcgcattgcctgcaacaagtacatggccaaatttgctggaaaggatgccttccatttgagggtaagggttcatcccttccatgttctgcggatcaacaagatgctttcatgtgctggtgctgataggcttcagactggaatgaggggtcttttgggaacctcagggacatgtgcagagttgcatggtaggtctgcttcagtcgtgaggaagaacagcaccatcacaggagctcgc

SEQ ID NO: 2608 - DNA, 393 bp, Gossypium hirsutum
  Clone ID: LIB3493-006-P1-M1-F7
tataagtgaacaaatcttgttctttgtaacattagttgccaagaaattgttcaatgcgaaaatcaagccttatatcccggatttcaagctcgcgttcgatcatttctgtattcatgctggtgggagggccgtaattgatgagcttgagaagaatttgcagcttcttccggtacatgctgaggcttcccgtatgactcttcaccgattcggcaacacttcttcaagttcgatctggtatgaacttgcctatacagaagcaaaaggccggatgcggaagggaaaccgtgtttggcagattgcattcgggagtggtttcaagtgtaacagcacggtttgggttgcgctccggaatgtgaagccatctcctaataatccatgggaagattgcattca

SEQ ID NO: 2609 - DNA, 436 bp, Gossypium hirsutum
  unsure (1)..(436): unsure at all n locations; Clone ID: LIB3493-006-P1-M1-F8
gtttccattgaagcacagatctttgatgaatttcttaagcaatattttaagggaggaaggtggatttgagtacaaaaaggccattgtagattcaattgtgattctaatcagagatatccctgaagcaaaggagagtggattgcttcatttgtgtgagttcattgaagattgtgaattcacatatctttccacacagatactccatttcttggggattgaaggcccaaaaacatctgatccaagcaaatatatacgctacatttacaaccgtgtgcatcttgagaatgccactgtccgggctggtgcagtgagcaccctagcaaaatttggcgctatggttgatggattgaagccccgcatatttgttctcttaaangcgctgtctttttgacaatgatgnatagggtcgtgacagggctacactctatcttaatac

SEQ ID NO: 2610 - DNA, 407 bp, Gossypium hirsutum
  Clone ID: LIB3493-006-P1-M1-F9
aggaatgcttgcagatccaaaggaggcacgtgctggtgtccgagagattcacttcctaccattcaaccctgtagacaagagaactgctctaacctacattgattctgatggaaactggcatcgtgctagcaaaggtgcacctgagcagattatagatctttgcaaatgcaaagatgatgtcaggaaaaaagttcattcagttattgataaatttgctgaacgtggacttcgatctttagctgttgcaagacaggaaatacctgagaaaacaaaagagagtcctggatccccgtggcagtttattggcttgttgccactatttgatccaccgaggcatgatagtgctgaaacaatcagaagagctctaaacctttggagtgaatgttaagatgattacctggggatca

SEQ ID NO: 2611 - DNA, 384 bp, Gossypium hirsutum
  Clone ID: LIB3493-006-P1-M1-G1
gattaaaatggttcaagagcttgatggtagtgtgatgcgttgtgtacgtgatcagaatggcaaccatgttatccaaaaatgcatcgaatgtgttcctgaggagaacatacaatttatagttacaacattttttgatcaagttgtgaccctttctgctcatccatatgggtgccgagtgatacagagaatattggagcactgcaaggacccaaaaacacagagcaaggttatggacgagattctaggatctgttagcatgttggcccaagaccagtatggcaattacgttgttcagcatgtactggagcatggaaagcctcatgagcgctcaattataattaaggagttagctggaaagattgtccagatgagtcaaacagaagt

SEQ ID NO: 2612 - DNA, 459 bp, Gossypium hirsutum
  Clone ID: LIB3493-006-P1-M1-G10
catttctcttccttacatcttttctttccttttcaacaattgcatcttttgcttttgatcccaaattctgggtttcctcttctgtccatcaatcaattcatactagttactcgaaatcgttaattttaagttgaagaaaaatgggcggtggtagggaaggtgaatcaagtgacaaagggctgttttctcatcttgctggctatgccgccggacattatcctccgcctggatcctaccctccacaaggatatcctcctcaaggatatcccccacaaggatacccaccggctggatatcctccaccagcgggatatcctcctcatggcggatacccacctgcaggatatcctcctcatggaggataccctcatccacctcatggtggatatccaccagctggttatcctggacacggtttgcatggacctcggatgggaggattattagccgggctggggc

SEQ ID NO: 2613 - DNA, 385 bp, Gossypium hirsutum
  Clone ID: LIB3493-006-P1-M1-G11
gcagtctctcccgctccttctcgctgcgatttcgtcttcaagatctcagttctcaaatcgtagcgctcttttctatcaagccatggctctggtcttgcatgcaggaaaaacaaacaaaaatgcctttaaggcactcattgctgcagaatatagtggtgtgcaggtcaaaatggttgaaaattttgagatgggtgtgtcaaataagactcctgagttcatcaagatgaaccctttggggaaggttcctgtgttggaaacacctgagggtcctgtatttgagagcaatgccattgctcgttatgttgctcgctcaaaggttaacaacccctatatgtggttctacattgattgattatggcatatcgagcaatggaatgattttgca

SEQ ID NO: 2614 - DNA, 348 bp, Gossypium hirsutum
  Clone ID: LIB3493-006-P1-M1-G12
ataaaattaaaacctaggcctggggtgcttcagttagagagaatttgaagaacaagaatggattctgccatagctcagaaaacatgggaattagaaaacaatatacttaccgtcgagacacctgacccttcatcggattctatattctactacgacgaggcggctcaagccaagttccagcaagagaagccttgggccaatgatcctcactacttcaagcgcgttaagatctctgcgctcgctcttcttaagatggttgtccacgcccgatctggtggtaccatagaggtgatggggctgatgcaaggcaagactgacggcgatgctatcattgtcatggacgccttt

SEQ ID NO: 2615 - DNA, 473 bp, Gossypium hirsutum
  unsure (1)..(473): unsure at all n locations; Clone ID: LIB3493-006-P1-M1-G2
gcgcttttcttatattgcttcagttgtgtaccctttgacatcagttccactgctcgtttattgtacgctgccagctatatgtctccttactggaaagtttattgtccctgagattagtaattatgctagtctccttttcatgtctctcttcatagtcatagctgtgactagtatcctagaaatgcagtggggaggtgttggaatacatgactggtggagaaatgagcagttctgggtgatcggtggtgtctcgtctcacctgtttgcactcttccagggcttgctcaaggttttagctggtgtaaacacaaacttcaccgttacctcaaaaggaggagatgatggagaattttccgaactgtacctattcaagtggacatctntattgattccccccatgacatttntgatcatcaacataattcgagtcataagtcggaattcagacgccatctctaatggatatgactcat

SEQ ID NO: 2616 - DNA, 343 bp, Gossypium hirsutum
  Clone ID: LIB3493-006-P1-M1-G3
cgaaattcctctttcaagatgcaaattttcgtcaagaccctcactggcaagaccatcacccttgaggtggaaagttctgataccatcgacaatgtaaagaccaagatccaagacaaggaagggatcccaccagaccaacagaggcttatctttgctggtaaacagctggaggatggccgtacccttgctgactacaacatccagaaggaatccacactccatttggtcctccgattgaggggtggtatgcaaatttttgtcaagaccctcaccgggaagaccatcacccctgagggtgaaagttctgataccatcgacaatgtaaaggccaagatccaagaca

SEQ ID NO: 2617 - DNA, 437 bp, Gossypium hirsutum
  Clone ID: LIB3493-006-P1-M1-G4
gattgctgaccgaattaacaagatgcttgctgtgcttgagacaaacatcttgtgggttaacccagactgtggtctcaagactcgcaagtatgccgaggtgaagccagccctgaacaacatggttgcagctgccaagctgctccgcacccaacttgcgagtgccaagtgagaggcatatccaaggtcggacatcatcctttatatcgaagatgatccagaggaaatttgtcttaaatcatttgaataactgtgtgttggaagtatttgttaggcgtatcatatgcccctctttgaggccaattgttttccttttcttttttggttatttcccctctaaatattttgtatttttgggaatatatgaattaccttcaattactttgaaaggcacgaaatttggtagtgtatcttttatgagcctaatgaaaaatgtagta

SEQ ID NO: 2618 - DNA, 403 bp, Gossypium hirsutum
  Clone ID: LIB3493-006-P1-M1-G5
ccagcctccactcctgagtgcaatggtttatgagatatacaatagaactggtgatgtggatttggtgaagaaggctctccctgcattgcttaaagaatatcagttctggaattcagaaatacatacgatgatcatccatgatgctgagaattgtaatcactcattaaaccggtattatgcaatgtggaacaaacccaggcctgaagcatcagccattgataaaagatttgcttccaagttcttgaatgttaatgagaaacagaaattttaccgagagcttgcttcaactgctgaatctggatgggatttcagcacaagatggatgaggaacccttctgaatttacaagtttgagcacaacaactattttacctggtgatttaaatgcattcatacctgaggat

SEQ ID NO: 2619 - DNA, 435 bp, Gossypium hirsutum
  Clone ID: LIB3493-006-P1-M1-G6
gtactatccggtgacggctatgcacaaggcggttggtggtttcggtggcctccgtgttaacagccgtctactcatccctgttccctacgctgatccggctgatgactatactctcttagtgggagactttttcaacaagggacacaccagcctcaagaagattcttgatagcggtcgcaaccttgggagatgtgacggtgtccaccttaatgggaaagttgcgaaaggtgatgggaaggatgaacctctgtttacgatggaggcaggcaaaacgtacaagtacaggatttgcaatacgggtatcaagacatctctgaacgtcaggttccagggccacaccatgaaattggttgagatggagggttcccacacaatgcagaatgactatgactcccttgatgtgcatgttggacagtgcttcagtgtgcttgtact

SEQ ID NO: 2620 - DNA, 461 bp, Gossypium hirsutum
  unsure (1)..(461): unsure at all n locations; Clone ID: LIB3493-006-P1-M1-G7
gtgggatatgtacaggttttggggccactgtgaatgttgctaaacccaaaaagggtcaaactgttgcagtttttggactgggtgccgttggtcttgccgccgctgaaggtgcaagggtttgtggggcttctcggatcatcgctgttgatgtgaaccccagaagatttgaagaagctaagaggtttgggattacagaatttgtgaatccaaaagactacgacaagccagttcaagaggtgattgtggagatgaccggcggaggagtggatcgcagtgtggagtgtacagggagcgtccaagccatgatttccgcttttgaatgcgtccatgataggtttggggtgttggtgcttgntggggtgccaaagaaagacgatgcattcaaaactcatccaatgaatctactaagtgagaggacccttaagggggctttttatggcaactataaaccacgcactgat

SEQ ID NO: 2621 - DNA, 476 bp, Gossypium hirsutum
  unsure (1)..(476): unsure at all n locations; Clone ID: LIB3493-006-P1-M1-G8
gtccgagatggtacatctcgagtagccattttcagagacagagagaaggatcgtactgacccggattatgacaggaattatcaaaggtacatcagaagcattccatgtaaccagagcgtcggtgtggctccttacaatatgcagaagattcaacttccattcatgcagtatgattctgcttttcctcagttgggtcagattgcaaatacacaagctcccctcggttatggtgttccttcgaggccagctgtgagtccgttttgtgagctgggattgaatccaacttctagggatggtgcttacatgcagtggccaagtgctaatatgatgttttcccattcatatgatcagtttatgcatgctgtatttcaggctccgtttgtccaccaaccacctctgagctacgattattcgatgaacggtaaaaaacggtaagatntgtatttctgcaaaaaattatcaaaatctgtagggct

SEQ ID NO: 2622 - DNA, 410 bp, Gossypium hirsutum
  Clone ID: LIB3493-006-P1-M1-G9
gtcaacaggcaatgttcatctggcctacaagcagtcgctgatgttgctgcttccataaaagcaggattttatgatattggcattggtgctggattggagagcatgacaactgacaaagttgttcctggggttcccaaagttaacccaaaggtagagagctttgcccaagcccgggattgccttcttcctatgggcattacttctgaaaatgttgcagaacactatggtgtgacacggcaagagcaagaccaggctgctgttgaatctcatcgacgtgctgctgctgcaacagcctctggtaaattcaaagatgaaattgtccctgtacttaccaaagattgggatcccaaaactggggaagagaaggcagccacaattattgtagatgatggaatccgcccaaacacaaa

SEQ ID NO: 2623 - DNA, 345 bp, Gossypium hirsutum
  Clone ID: LIB3493-006-P1-M1-H1
gaaaaacattatatgaatgctctaaattcaattcccatgtcgagatcattgattcaacgcattactccatttttcatagctcgaatcaagcaaaaccataagcttctaagctcttctttttcttcatcttcttcagctattcatgaggcttcttctgaatctccatctccttccctcgatgcagttcacatgactgataattgcataaagagaatgaaagaattgcaagcaagtgagcaatcatctgatcataagatgcttcgattgagtgtagaaactggtggatgttcgggtttcaaaacgtgttcgattcgatgacaaaacagacccagatgacagagtttt

SEQ ID NO: 2624 - DNA, 409 bp, Gossypium hirsutum
  Clone ID: LIB3493-006-P1-M1-H10
gttagttcttggtgctgggactctaccttttggtacccttttcatcgagcttttcttcatcatgtctagcatttggatgggacgagtgtactatgtctttgggtttctgttcattgttctggtcttacttgttgtggtttgcgctgaagtatctttggtgttaacttacatgcatctgtgtgtggaggactggaaatggtggtggaaatcgttctttgcatccggctcagttgccatctacatcttcctgtactccataaactatctcatatttgatcttaagagcttgagtggacctgtctcggctactctgtacttggggtattctctcttcatggttctcacaatcatgttcgcaactggcacagttggattcctttcttctttctgggttgtgcattatttattc

SEQ ID NO: 2625 - DNA, 335 bp, Gossypium hirsutum
  Clone ID: LIB3493-006-P1-M1-H11
cttattgtgaacaacacagtgtggagcagagagcaaaggttgaaactcataaacatggaattgaggagttgaaaaacatgaagcaaattcgggttgaactggaaagattacgccttctttgtgaaagaataatcaaacgtgaaaaattgaagcgagagttggttctttgctcacatgaaatacttgcctgtaaaagagatcatgttactcgttcagtgcttgtgcatagtcccttgctccatccggatgttagctccgaatctgcaacaacttgtctcaaaggccatacagatgataacaaatcatgcaggaagcaatgcatctgatgatgtact

SEQ ID NO: 2626 - DNA, 331 bp, Gossypium hirsutum
  Clone ID: LIB3493-006-P1-M1-H12
ccggctctctatcgcccccctcccatagctctagagattattcctttctcaaaaatttcttcttttctcataatacatataaaaaatcctccttcttttatactcttctctttgtcttatataatctcagggtgatagagcaacaaaaatacgaccatatatcaaaggaaaaaaaataaagagagattcaagggattatacgatgaccaagttaccttctttgtttctggttttgactttggtttctgtttttgtttgggggtttggaaaaaggataccaattctgtcatttgatgaagggtatagtcagttgtttggagatgataatcta

SEQ ID NO: 2627 - DNA, 376 bp, Gossypium hirsutum
  Clone ID: LIB3493-006-P1-M1-H2
gaagattttatgggtggtgctgaaatcgtcaagtcagacccagttgtctcattccgtgaaactgtcctagagaggtcttgcaggactgtgatgagcaagtctcccaacaagcacaaccgattatacatggaagctcgacccttggaggaaggtctggctgaagccattgatgaaggtcgtattggtccaagagatgatcccaaggttcgttcaaaaattttggctgaggagtatggatgggacaaagatcttgctaagaagatatggtgttttggccctgagaccacaggtcctaacatggtggttgatatgtgtaaaaggagttcagtacctgaatgaaattaaaggatcagtagtcgctgggtccaatgggcat

SEQ ID NO: 2628 - DNA, 351 bp, Gossypium hirsutum
  Clone ID: LIB3493-006-P1-M1-H3
gcggcctcggcgttctccggctgccgctacgtcaccgcttcccgtagtttctccgcggaggctgccaaaacgatctcgccatcgtcggatcgagtgaagtgggactacaggggtcaaagaaaaataatccctctcggtcagtgggtccctaaggtagctgtcgacgcttacgttgcccccaacgttgtcttggccggtcaagtaacagttaacgacggagcctcggtgtggaatggttgcgtcctacgtggcgatctcaacaagatcaccgttgggttctgctctaatgtccaggaacgctgcgtcattcacgccgcttggtcctctccgaccggacttccagctgagaca

SEQ ID NO: 2629 - DNA, 431 bp, Gossypium hirsutum
  Clone ID: LIB3493-006-P1-M1-H4
gttcagagtcataagcaacatcaatggctccttcaactctgacggctcttgcggaagagaaaaccttgcaggcaagcttcgttcgtgatgaagatgagcgtcctaaggttgcttacaaccaattcagtaatgatatccctgtcatctctcttgctggtatcgatgatgttgatggcaagaggggtgagatatgcaagaagattgttgaggcttgtgaggattgggtgtcttccaggttgtggatcatggtgttgatactaaactcgtgtccgaaatgacccgtcttgcgagagagttttttgctttgcctgctgaagagaagcttcggttcgatatgtctggtggcaagaaaagagtggttcatcgtctccagccaccttcagggagaagcagtgcaagattggcgagagattgtgacatacttttcatac

SEQ ID NO: 2630 - DNA, 357 bp, Gossypium hirsutum
  unsure (1)..(357): unsure at all n locations; Clone ID: LIB3493-006-P1-M1-H5
aagctacagaagcggctctccgcgagcgttctaaagtgtggaaaaggaaaggtttggctcgatcctaatgaagtcaacgagatctctatggccaactcccggcagaacataaggaagttggttaaagatggttttatcatcaggaagccaaccaagattcactctcgatctcgtgctcgtcgcatgaaggaagccaagagaaagggacgtcactctggatatggtaagcgcangggtacaagggaggcaaggttgcccacaaagatcttatggatgagaaggatgcgtgtacttagacgcctactccgcaagtacagggaatcaaagaagattgacaagcacatgtaccatgacatg

SEQ ID NO: 2631 - DNA, 331 bp, Gossypium hirsutum
  Clone ID: LIB3493-006-P1-M1-H6
cttcaagtaaaagtttcaagtttttaagaattaatctgcctgctggaggtcatccaatagctgttgcattttctgatgatgcatcttccatagttgtggcttctcaggctatgactggttgttccttgtatatgtatgaagaagaaaaaccaaaaacggccaatggacccaagcaacagacgaagctccctccgcaaattaagtgggaacaccacaaaatccatgagaaacaagcaatcctgaccctaactggatctactgcaacttatggaactgcagatgggagtaccattattgcctcttgttcagaaggtactgatatcacactttg

SEQ ID NO: 2632 - DNA, 412 bp, Gossypium hirsutum
  Clone ID: LIB3493-006-P1-M1-H7
catcgccacccttccttcacaaccttcctccaccgtcccctcccccgttcctccttccatcaccttccactacctccccaccgtcgacctccttctaacctcaactggcttagatccccttctcttcgacgtcatccgcctcagtaaccccgatgtccgccgcacccttctcaccatctccaataactacacactcaacgccattatcgttgacttcttctgcaccagcgcagcattcgaagtggcctccgatctcaaccttcctgcttactctttcctcccatccgccctcggtgctgttgcttgcttactttatttgcccaccctcagtaacaaatttactcaaagcttccaacatctcaacgttttccttgatatccctggtgcgccaccgattccatctgcagatatg

SEQ ID NO: 2633 - DNA, 345 bp, Gossypium hirsutum
  Clone ID: LIB3493-006-P1-M1-H8
gttacatgagcaagccgcatggcctgctatagatactccgtagtggctatacaaagtttcaactatatattatctatatttggccaaactaggtgaacgaacaacttttaatgaccggctttatattcacttccgacgtgtgagtgtcgccctcacaatagccaatcaaatttttgcgtctctgatcacacgttcgatgtaggtttggaattttctccctaactgtggatacataattactgatcaaggtccaaatttaattgtgtggggaccaatacatctccatgattattaaaaatatatccgccattcttgcttgttctctacaaaagaaacaaaataaat

SEQ ID NO: 2634 - DNA, 120 bp, Gossypium hirsutum
  Clone ID: LIB3493-006-P1-M1-H9
acgtccactcgtccaaaaagagtgagtttcgcacagcgtaacagagacggctcttagcttgaaaccttattgcctggtagccttatatttgccccgtataactttgaatgcattggatac

SEQ ID NO: 2635 - DNA, 256 bp, Gossypium hirsutum
  Clone ID: LIB3493-007-P1-M1-A10
gcaacttctttggaaaacttgtcttattggagctggtcctgatgggaaacacactgcattagaagcagtcactattgttctagacctcccaccacctcagcctggatcaatgtctgggtttacatcagtagacagggtatctgcatctgatccaaagtcggctctagcattacagagattggtccaagcagctgtgtggttccttggggaaaatgctaattatgctgcttcagaatatgcttgggaatccgcaacg

SEQ ID NO: 2636 - DNA, 283 bp, Gossypium hirsutum
  Clone ID: LIB3493-007-P1-M1-A12
agctcaatacccgaacaaatacgtaatgattctagatatatgccgcattttaaggattgcataggtgcaattgatggtacacacattgcggctattcttccaccaaatgaacaaattccctatattggaagaaaatgtatctcgactcaaaatgttatggcagtatgtgattttaatatgtgtttcacatttgtcatggctggatgggaaggatcggcacatgacagtagaatatttcttgataccaattcagatccaaaatacaaattcccgcacccttcaa

SEQ ID NO: 2637 - DNA, 495 bp, Gossypium hirsutum
  Clone ID: LIB3493-007-P1-M1-A2
cggacgcgtgggtcttgatcctgctcgacctttgacgcaagtcaagaaaaggagtcctttttcatccttctgcccagactatcgcctaatcaaaaatcaatcatggctgtgaccatcaagcgagcggccctgatcgttgccagtcttggcgtcttatcttttatctttggagtcattgccgaaaacaagaagcctgcagctggaactccaatttctggaaaagatgtggttatttgtaagtatccatcggatccttcggtggttctgggctacctatcggttgcatttctgatactatctactctcactggctattggtccctgttttacccctacaaaggaaaatctgttccacagtctgttctcttccgaaacactagtttcttcgtcttcttcaacattgccttgtttacaggtggcttagcagccactctgctcttgtggccgacgatcacagagcacctgcacttgattcgtaatgttcatcacaatctc

SEQ ID NO: 2638 - DNA, 324 bp, Gossypium hirsutum
  Clone ID: LIB3493-007-P1-M1-A3
ttatcctcgtgcccaaactatcgcctaatcaaaaatcattcatggctgtgaccatcaagcgagcggtcctcatccaagccagtcttggcatcttatcttttatctttggagtcattgccgaaaacaagaatcctgcttctggtactccaatttctggaaatgatgtggttatttgcaagtatccatcggatccttcgttggttctgggctacctatcgattgcatctttgatactatctactctcacttgctatctgtccctgttttacccctacatacgtaaatttttttcacagttcttttctcttactaaacactagtttt

SEQ ID NO: 2639 - DNA, 335 bp, Gossypium hirsutum
  unsure (1)..(335): unsure at all n locations; Clone ID: LIB3493-007-P1-M1-A4
gttctctcttactgtgattntactaatgacccatctcattcttgttttgggggcagttttttgcatccgtctcttcaaatttgcatacaacaccatatggatccctttcagaatccaaaaccatntcaagaagcaaggagtaaccggtccccgctaccgtcccatctttggaaacatgcctgagatccgccgtctgttcgaagaaagcaatgtcgaagccatcttcacttcacgacggcgaccacgatgtccttcccgcgggtgggctccggtctacccacaagtgggtccaacatatatgggaaaaaccgtttttgtattgggtctgggttcac

SEQ ID NO: 2640 - DNA, 307 bp, Gossypium hirsutum
  Clone ID: LIB3493-007-P1-M1-A5
gaaaaagaagagagcttttttttttttctttggtgagatctaaacaatttgagtggttctggtttttgttgtttgaaaatctttcccccttttttctattactccccgcttctctgaagccctttctgttaatcatctgtcttttgaatcaaaatctgatttttgggtttgtttttcatcagtacttagcaaatgtgtcaaaagcaaacttagacaaggatttctttaaaagtcaggtgttttcagaaacgagatccaggtttttttttatttccttcagctttgttgatataaagtttcaatattt

SEQ ID NO: 2641 - DNA, 366 bp, Gossypium hirsutum
  unsure (1)..(366): unsure at all n locations; Clone ID: LIB3493-007-P1-M1-A6
cttttggtggtatgatctttgctcttgtttactgcactgctggcatttcaggtggccatatcaacccggcagtgacttttggactgttcttggcgaggaagctgtcgttgacgagggcaattttctacatggtgatgcagtgtttgggcgccatatgcggggcgggtgtggtgaaaggtttcatggggaagactcagtacggtatgttgggcggcgagctaactcggtggtcatggtacacanaagtgatggctggtgctgaatgtcgaccttgtctgttacctgctctagcactgcgcagccacgccgacttatgtctattgacatgcaatggtcaggtctgtcatacacatccatatgactgat

SEQ ID NO: 2642 - DNA, 350 bp, Gossypium hirsutum
  unsure (1)..(350): unsure at all n locations; Clone ID: LIB3493-007-P1-M1-A7
gngattcaagaagacttttatgctgtagttgattgggcatacaagattgaccctctgcgttgcatatccatgcatggtataacagagcgctatctatctggccagaaagctgatgcagcaggatttgtgcgtctcctgcttggtgctcttgaatcaaaaatttctatgcagttcagcaagtttgttgacgaggcttgtcatcaaattgaaagaaatgaacgcaacgtgcgacaaatgggagtcttgtcgtacatccctcgctntgcaactctagccacccgcatggaacagtacattcaaagacaatcacgggactnggtgatcagcatacaccaaattgntagcgtatg

SEQ ID NO: 2643 - DNA, 450 bp, Gossypium hirsutum
  unsure (1)..(450): unsure at all n locations; Clone ID: LIB3493-007-P1-M1-A9
gaggatgcatacaggttattcccagaagcatcagactgggagccaaatgattgtaccagcatctcaaggaacaccttctagtgaggtatcagtgaaagctaaaaagaaaagaacggacaagagcagtcaaaagcgcaagtccttgtctgctgataagagttctccatcaactccagctcatgatagtggagcaagaagtagcactgaacaattgcccaaagctcagaaaaatggaaaaatacgcaattctcttgcttcaacacgacctgagaacatagatgacgagccaagagatagtgacaacagtacttctcttccccatttcatgcaagccacagaatctgcaagagctaaggtaatgcaaataactcaccaagatcaagttccaatgtgcaagacaagagacatttacnatcaagaagagacattccttacctgcttgtaatggga

SEQ ID NO: 2644 - DNA, 422 bp, Gossypium hirsutum
  unsure (1)..(422): unsure at all n locations; Clone ID: LIB3493-007-P1-M1-B1
cgagttccgacctaggcgtacgcaagaggatgcgttcaagacgctcgccaaggaccaagccagggtgcagtttttgtccagcctggtggctaagaaatctgtggtgcctatagcttcaggcaggcagattgtgcaaagcccaacttacattgtgaaggccaatattggaaccccacctcagcccatgcttatggccatggatacaagcagtgatgctgcttgggtgcctngcactggctgcattggctgctcttctactgcttttgactttgctaaatccaccactttcaagacccttggctgccaagctgctcaatgcangcaggtaccaaaccccacttgcggcggaaggccgtgcgcattcaacatgacccacggtggctcaaccataaccggaacctatcacaggacaccataaccta

SEQ ID NO: 2645 - DNA, 325 bp, Gossypium hirsutum
  Clone ID: LIB3493-007-P1-M1-B10
cggacgcgtgggaattgctgctgacctcaaagagcatgtcatcaagcctgtcatccctgaaaagtacctagatgagaaaacaatcttccaccttaacccatctggccgctttgtcattggtggtcctcacggtgatgcaggtctcactggtcgtaagatcattattgacacctatggtggctggggagcccatggtggcggtgctttctctggaaaggaccctaccaaggtggacaggagtggtgcttacattgttaggcaggctgccaagagcattgtggctaatgggcttgcccgaaggtgcattgtgcaggtctcttatgct

SEQ ID NO: 2646 - DNA, 258 bp, Gossypium hirsutum
  Clone ID: LIB3493-007-P1-M1-B11
atttgggtactatgctcaagcaactgctgcacaggaaatattcggccacacattgcagtctcttcgtggaattaaatatttgtacaagtataatgtatttcaaatcgcattcattgttttagcagcattgaccttcgtgtattatgttgcctttggatggagaagaaaaaaacctagcggcaggttccagctttcctcgtaagaatgttcccctggaagacaatgcaacctctcaagtaatcatatttctcttttata

SEQ ID NO: 2647 - DNA, 319 bp, Gossypium hirsutum
  Clone ID: LIB3493-007-P1-M1-B12
tcttcgttcaaccacgcctaataaccgctcgggtttttctcagacgtgcaaaaaatggggctgtctttcaccaagctattcagccggctatttgccaaaaaggagatgcgtatactgatggttgggcttgatgctgctggtaaaaccaccattctttacaagctgaagttgggagagattgtcactactattcccaccatcggtttcaatgttgagaccgttgaatacaagaacatcagcttcactgtttgggatgttggcggccaggacaagatccgaccattgtggagacactatttccaaaacacgcaaggactta

SEQ ID NO: 2648 - DNA, 442 bp, Gossypium hirsutum
  unsure (1)..(442): unsure at all n locations; Clone ID: LIB3493-007-P1-M1-B2
ggactggagtgcatggattggcctgttggtttgatgtcctgtttaatggaagcaccgtgcaaagatggcttacaaccgcccctggtgctcctacaacccactggtaccagatacgatgtgttctttctcagccaatttatgtaatggctgggcaagaaattactggccgacttcacatggttgcccataacgctcaaagttataccatatatctaacattgtcagctaaaatgtggggtcccggggctgaacaaggaggaattattcagtcctcatcatgcaaactcgatctcaaggaaccttattacagaatgtcacagcctcaaccctacacaactgcacaagaccaacaaccgcaccagctactgcagcctcaggatataccaatccacaccgatgacnttagaggaaccangttgctgcagcagccattagaaaattc

SEQ ID NO: 2649 - DNA, 312 bp, Gossypium hirsutum
  Clone ID: LIB3493-007-P1-M1-B3
tactctggaagctgtcgcctgggtccggccggattccgggtcgccacgcgtcattgaacctgaatcatgctctatttacgagatgcaaatgcgcatgctgcaagaagatacatgtgcgactgttagatcactgcgacgagggtatgctgctgatggaaaccaatttcataacggcagcctattacacttgtggaaacctcaccttaaccaatatactgtcgtccatgttgggcaaggtggcaagaataatccaaccgccccttttggataaagctgtcccaattagctggggggatatgtacaggttttggg

SEQ ID NO: 2650 - DNA, 184 bp, Gossypium hirsutum
  Clone ID: LIB3493-007-P1-M1-B5
tttttgactgcaaaaacgccaccgcaacactaaaaacccgccgtctcaaatcaaacgaagaaaccaaaagcttcgatggccatcgccgccgccatttccctctccctcccgccacaaactcgccgttccttgcctcatcgcgccttttgatcaattttctttattcatttttcgtcactttttt

SEQ ID NO: 2651 - DNA, 457 bp, Gossypium hirsutum
  Clone ID: LIB3493-007-P1-M1-B7
cggacgcgtgggctggtggtgtactgagagagcccttgattggggtcctactggtggacctgatctgatcgtcgatgatggtggtgatgctactttgttgatccacgaaggtgttaaagctgaggaagtttatgagaaaactggtcaactcccagatccggcttcgactgataacgctgagtttcagattgttttaaccattatcagagatgggttgaaagcagatcccaagaagtatagaaggatgaaggagagattggtaggtgtttctgaagaaactacaactggagttaagaggctttatcagatgcaggccaacggtaccttgttgttccctgccattaatgtcaatgactctgttactaagagcaagttcgataacttgtatggatgccgtcactcacttcccgatggtttgatgagagctactgatgtgatgattgccggcaagggtcgc

SEQ ID NO: 2652 - DNA, 366 bp, Gossypium hirsutum
  unsure (1)..(366): unsure at all n locations; Clone ID: LIB3493-007-P1-M1-B8
gcaaaatgcagtaccatttttccatattagctttgctctcaatatttttcttcttcattagggtaggatttgcagacgacaacactgttaaattcgatgaaaactatgtaattacatggggaaatgatcatgttttgtctttaaatcaagacactgaaattcaactctcaatggataagtcttcgggagctgggtttggttcgaagctgagttatggtactgggttttttaatatgaggatgaagctacctgataaagattcagctggagttgtcactgcttattacttaacttcgaaaggaaagaagcatgacgagctggattntgagttcatagggaatagagaagggaagcctattagcttgc

SEQ ID NO: 2653 - DNA, 361 bp, Gossypium hirsutum
  Clone ID: LIB3493-007-P1-M1-B9
ctgaagccaaagctatacaaataggatctaaagatagatcaaagaaaagggtcgaagcaagttgttttgtttcaatggaagttggtcgaaaaatggctaacatgcttggaactgacgatgatttgaacttcaaagagaccgaactgtgtcttggtttgcccggtggaatcgctgttgttgctgcaggtaatgaaacggaaagttcttcttccccaaagactaatggcaagagaggcttctctgagactgttgatttgaagcttaatcttcaatccaaagaatctaccatggatctaaacaagaaccttgatgacaatggttctaagggaaaaataggttctgcccaaaatcctgcaaaacc

SEQ ID NO: 2654 - DNA, 430 bp, Gossypium hirsutum
  unsure (1)..(430): unsure at all n locations; Clone ID: LIB3493-007-P1-M1-C1
cggacgcgtgggtgggcggacaagattcatggattcacagttccagctgatggacaacatcatgttcaaacactgcatgaaccatatggtgtatgtgggctgatcattccatggaattttcctcttttattgtattcctggaaagttggtccggcattagcttgcggtaacacggttgttctgaagacagcagagcagacaccgctgtcggctatctatgtttccaaagcttttcatgaggctggactttccttctggtgttcctaaatgtggtcctctggaatttggtccctacangcttnggtgcagccacttttcaaaagtcacaattgaatgtcaaacaaaggttatcaattttacaaggttccacttgctacccaggcaagatttgtactcgcactcgctgcaaaaaagcaaccttaaaaccggt

SEQ ID NO: 2655 - DNA, 249 bp, Gossypium hirsutum
  Clone ID: LIB3493-007-P1-M1-C10
cggacgcgtgggtgataatcgagtttttataagcggttgatcctggcattccaaaatttgaattgtgtggctgaatgatctatggagactaagggagggaaaaagaagtctagtagtagtaagtcattattctacgaagctcctctcggttacagcattgaagacgttcgaccaaacggtggaatcaagaagttcagatctgctgcttactccaactgcgctcgcaaaccatcctgatattcgtaacgc

SEQ ID NO: 2656 - DNA, 262 bp, Gossypium hirsutum
  Clone ID: LIB3493-007-P1-M1-C11
cctcagcacactgttactccctcagctctgcgcgaaaccctaaagcaatgcctcccaaagcagctaaatccaaggaagcaccagcggagaggcccatcctcggccgattctcttctcatctcaagatcggaatcgtgggactgcctaatgttgggaagtctactcttttcaacacgctcactaagctttcaatcccagctgagaacttccctttttgtacaatcgagcctaatgaagcccgagttaatgtccctgatgagcg

SEQ ID NO: 2657 - DNA, 263 bp, Gossypium hirsutum
  Clone ID: LIB3493-007-P1-M1-C12
aaaactaattgaagagttcatcttcatacatccgtgactgcagtggtagctagatggaacacgtacaagcatatcctcccccggctgcaccaagtgcttacccacctttggctactcctgtttccgtgattgggcctcaatactgctatcctcaaccagtagatctggctgtcgtcagaaaggttttgaccatcactgagggcaactttgctgtcactgacatcaatggcaacatcatgttcaaaatcaaaggcaaatttttc

SEQ ID NO: 2658 - DNA, 273 bp, Gossypium hirsutum
  Clone ID: LIB3493-007-P1-M1-C3
gggaatgagcattttaagacccaaagtcaaccgagaaaggcataggacaacttttttcaacaggttttttcgttggtgtgcagcctttcttttactagcactaattctgatgattcgtgcccgtaatattatggatagtgaaggaaggactcattacatggaaaccatgtttcctctttacagtttgttcggcttcattgttctacacatgttaatgtatgccatcaatatattctactggcggaagtacagagtcaattatgcctccatatt

SEQ ID NO: 2659 - DNA, 346 bp, Gossypium hirsutum
  unsure (1)..(346): unsure at all n locations; Clone ID: LIB3493-007-P1-M1-C4
cggacgcgtgggttcatgaagtcactaagtgatgaagattatgaaactaaacagaatatcacagccccaactaatcacagcaatgtcaatggaaagaacaatgaaattcgtgtgggaataaaggactggttagtatattttctcttcgaaactntggctactctaatcattgatgaggataaacatatatgggaaatcatactgaaatagtcttacccgaatcaatttagcaatgccaaagtgcaggttcaagcccaatattagcaccaaatctctatgtcatacagttttcttaagggcacatattaaattgcagaaaacagcaccaaatccagcagagatctaa

SEQ ID NO: 2660 - DNA, 316 bp, Gossypium hirsutum
  unsure (1)..(316): unsure at all n locations; Clone ID: LIB3493-007-P1-M1-C5
tgatagcaagacaccccatattgtattgttcggtcaactcattttctgtgagcagcgggcttctcagagctgctcaggtgatacagttggaaacagttcatcagatgggaatacagagaagactgctatttcctctgatggaactggatctgtgttacatcaaaatgttcgggaaaattcttcggatgaagggtttccttggtgcanagagcatcaaaaaactgatctaggattggagactggtcattgcanagtgtttatggaatcagagaatgtngtagaatncctgatcttcagttctcnatcatatgaagag

SEQ ID NO: 2661 - DNA, 341 bp, Gossypium hirsutum
  Clone ID: LIB3493-007-P1-M1-C6
actcacccatatccacccgccctgctaaattctgcgactcgaaaaaaacacaaaaaacatatatagtttagctatgggtgggaacaagcacaagaagtccttctctttcttcactagcttgtttaaaggcaagaagggccgtagagaccatgattactactcctatggggatgatgcttggggcgccgccaggaagatttatcccagtgatgaagacaatactcacagggtggttgctgagcccggtatcgacaagagagcctcagctttcattgctaatttccatgcaactcgtgtttctgaagccatccatcatcaacaagctggctgaaaagaaaaac

SEQ ID NO: 2662 - DNA, 463 bp, Gossypium hirsutum
  Clone ID: LIB3493-007-P1-M1-C7
gggaaaccctcttcacctcaaatctttgaaccacatctcccttgtgtgtagatcagttgaggaatccatgaacttttatcaggatattcttgggtttgctccaatcaggagacctggatcatttgactttaatggggcatggttgtttggatacggaattggaatacatctcctgcaatcggaggatccagagagtttgcccaagaaaaaggaaatcaatcccaaggataatcacatttctttccagtgtgagagtatgggagcagtggagaagaagctgaaggaaatggaactggaacacgtacgggcaatagtggaagaaggtggaatctacgttgaacaactcttcttccatgacccagatgggttcatgatcgagatatgcaactgtgataaccctaccggtcatccccactagccggtgagatgcctcgttcatgctcccgacttaacctgcaacaca

SEQ ID NO: 2663 - DNA, 468 bp, Gossypium hirsutum
  Clone ID: LIB3493-007-P1-M1-C8
cggacgcgtgggtgacaagtgaactttctggaaatgtaattgatatttgccctgttggagcacttacctctaaaccctttgccttcaaggcccgaaactgggagttgaaaggaaccgagaccattgatgtaactgatgcagttggatccaatattcggattgacagtagaggtccggaggttatgcgtatccttccacgtttaaatgaggatataaatgaagaatggatatcagataagactcgtttctgttatgatggtttgaagaggcaaaggctaaatgaccctatgattcgtggtgcggatgggcgctttaaggctgtgagctggcgcgatgctttggctgttgttgctgaggttgcccttcacgttaaacccgaggaaattgttgggatcgctggtcaactttctgatgctgaatccatgatggcactaaaagatttgttaaaccgcatggatcaaacaatgt

SEQ ID NO: 2664 - DNA, 406 bp, Gossypium hirsutum
  unsure (1)..(406): unsure at all n locations; Clone ID: LIB3493-007-P1-M1-D1
tccacatttcactctctttttcaactttctcttcttctctttgttttaaagaggggctggagttttagccaaagaaaactccatggctaaacttgttgctactttcttcttggctctcattgccatctccatggttcaaactttggttatggcatcacatggacatggtggtcaccattatgataacaaacgttatggacctgaagtctcaagcctaccaatgtcatccagtgcacaaggagggtagcagaccagaccataaccatgctgtctttgcagaatgtgcangcatgccttgtgttctcaggatatgggacaaacagttgccttgtcaacactgaaaccaagaggaggccanatccctaaatactaaagaaacccttttttacatatatctataattcta

SEQ ID NO: 2665 - DNA, 345 bp, Gossypium hirsutum
  Clone ID: LIB3493-007-P1-M1-D10
ccagcctaagggttgatcatgtgctagctatcaccatgaatgatagaaatcctaaatgcagggatgggttaaggtaataatattaagattaggaagaataggtggctgactgagcaattacgaaacatatggaatttgcaaggagaaaggggaggtgtatgcaatgaaaaagtgagccaattttgaataaaattcatgaattcagggcagggtttcaggattgtaaatctggttttgtacctaggaatgctaatcaggcccggaggacgtgtgtattgataacaacgaaaatcaattggtatgttctttggtgtacattcttcacaaaaatggactgattttagc

SEQ ID NO: 2666 - DNA, 272 bp, Gossypium hirsutum
  Clone ID: LIB3493-007-P1-M1-D11
cggacgcgtggggcatggtgttagcagacaatgttgatggtggtgatgatctagatcttatcgttacaactatgaatggaaatgtcttttgcttctcaacccctgccccgcatcatcctctcaaggcatggaggtcaaataaccaaggaagaaacaatgtcgcaaacaggtgcaaccgtgagggagtctatgttactcatttatcccgagctttccgtgatgaggaaggcaaaaagctctgggtggagattgagattgtggataaacataga

SEQ ID NO: 2667 - DNA, 287 bp, Gossypium hirsutum
  Clone ID: LIB3493-007-P1-M1-D12
caagcagcatctaatttggttgcagggagtaacttagagggaacaatccaacaaattcttgacattggtggagggacctgggacagggacactgttgtccgcgcccttcgcgctgcttataataacccagagagagctgttgaatatttgtattctggcatccctgagcaagctgaagctccacctgtggcccatgctcctgtagttgggcaaaccactagccctgcagcaccaccttaacagcctgcacaaatggcagctattcctactagtggacctaatgcaaa

SEQ ID NO: 2668 - DNA, 296 bp, Gossypium hirsutum
  unsure (1)..(296): unsure at all n locations; Clone ID: LIB3493-007-P1-M1-D2
ctcctactcctactactactaacatcaattttctcgatgaatgtggggagaaaaagaatcttactccaaaatccgcagccaataagagaaggtcaaagagtaaaggagggaaactggaagagaaaagagttttaaatgatgggtttgtgatttctaacaataattttaataataggagtgatcatgaccagngtaatgtggaaagactgggtggtggtggcggtggcagtggtgctggaggagaaagaggaaacctgacagcagtagtagaggagacggtgaagagttgttaacac

SEQ ID NO: 2669 - DNA, 384 bp, Gossypium hirsutum
  Clone ID: LIB3493-007-P1-M1-D3
gggagattaaaatcagtgaatcacagagtgatgatgagcggagacaaagatcgatactctatagcagctttcgtcattccaaatgagggtactataatcaagacacccaaagagtttatagatgaccaacatcctcggcttttcaaggacttagatttcatggagttctttcttttgccttttcgatcctgcaagcacatcgacaacgggagttgtccatgtcttgctgcctctaccaccagttcaataaaatatgctcatataacaagtaaagttggactggtttaataatgtacaatataaatggtctatactcagacacgtctgactgatacatgtatattgtatatggacactaattacatgtgagatgtgttataacat

SEQ ID NO: 2670 - DNA, 227 bp, Gossypium hirsutum
  unsure (1)..(227): unsure at all n locations; Clone ID: LIB3493-007-P1-M1-D5
ctgttctacttttgatgcttttggcatttgggattcttattctgtttcaaagatgccgaccaagacggacttttgaaactcatatacgacanaaggttgttcaagacaatccaacaaccggggtttcatccgaagttcttgcaaatgccagattcatttctgaagttgctaaaactggggacacaaggtactccaatatgtagactggtttcccatggaagagttgg

SEQ ID NO: 2671 - DNA, 200 bp, Gossypium hirsutum
  unsure (1)..(200): unsure at all n locations; Clone ID: LIB3493-007-P1-M1-D6
attctctgaaaatttttgtgctgaactccttttttctgtttgtactaccatgtgtggaggtgctattatctccgatttataccgncgtcgcggtcgcgacgattgacggccgatttctggtgcccgatctgaaaaatccggttgaaaagggtcggtaagaatctcgagccgtgatcactggcgatattcgaactgcttag

SEQ ID NO: 2672 - DNA, 369 bp, Gossypium hirsutum
  Clone ID: LIB3493-007-P1-M1-D7
ctcattttctctcaatccaaacagaggaagaaaataaagcattagcaagaaaaaatggcttcctcaacactctcaactgtctctctccgttccccttcttatccttcacccactactactacagcccattttttcaaaaccccttctcttcaattccctctccgttccaccgccactactaccctcacccaccgtaccacattcctccgtcctctcaacgccaccgcggcacccgaaaaaatcgaaaacctcggcactgaaatctccaacttaaccctcgaagaagcccgaacactcgtcgactacctccaggacaaaactcgggtctccgccgctgcatttgccccttgccgcgtcgcgtcgcagcac

SEQ ID NO: 2673 - DNA, 322 bp, Gossypium hirsutum
  Clone ID: LIB3493-007-P1-M1-D8
cggacgcgtgggtttgcactttttggatctggaaagaggtgaaatctctgacgttttgagtacgacgccacctgatgtccctcttggttccactgtggttacctgtggcaaccacgtttacaccattgggggaaagatccttcggggtggtatccttcgttcattaaaccatgttttccgctttgattttaagcacgctgaacgtgggtggagaaaagttagttctatgctgtaccctcggggtcttcccgaggctcttgctgcacaagggaaagattacgtcttcaagggatcccgtgattgttttagcgagatttacgat

SEQ ID NO: 2674 - DNA, 356 bp, Gossypium hirsutum
  Clone ID: LIB3493-007-P1-M1-D9
cggacgcgtgggcgggaaggtggtgcacggcaacatcaaggcctccaacgtccttctccgaccagaccaagatgcttgcatctctgacttcggtctcaatcctttgttcggcaactccaccccacctagtcgtgttgcaggctaccgagcacctgaagtgcttgaaacccgaaaagttactttcaagtctgatgtgtatagctgtggagtgttgttgctagagttattaaccggcaaagcacctaatcaagcatcgttaggcgaagaagggatcgatcttcctcgttgggtccaatccgtggttcgggaagaatggacggccgaagtttttgacgtggaattgatgagatatcaca

SEQ ID NO: 2675 - DNA, 380 bp, Gossypium hirsutum
  unsure (1)..(380): unsure at all n locations; Clone ID: LIB3493-007-P1-M1-E1
gccaagtgcgacggagtattgtttatggagatcaaccaaggaatagattggatctctacttgcccacaaatactgatggcccaaagccagttgtggtgtttgtgactgggggagcatggataattgggtacaaggcttggggttctcttctaggactacaattggcagaaagagatatcatagtagcatgtgttgattacaggaactttccccagggaaccattagtgatatggtgaaagatgtatctcaaggggtctcatttgtctgcaatctcattgacagatttggagaatctatttaatgggggagtcagcgggagcacatatnntctgctgtgttcttttggagcaagcaatcaaagaatctagaggagaaagca

SEQ ID NO: 2676 - DNA, 327 bp, Gossypium hirsutum
  Clone ID: LIB3493-007-P1-M1-E10
aaaaacatggacgctattcctcccattgatgcactcaaccctaccgagttgaatggacccggtgttggcattcacgaagatcatgttgtcccaaaaggtgctgaaattggtactcttggttttggttttgaaggtggtcctgataaatgttgttcttctggatgttccggtaattgtaatcctggtggtttcgttctaccatttcctcaaattccagaaatcccaagaattccagaaatcccacaaatcccacagatcccacaaatcccacaaattccactaatcccacagatcccacaagtcccacagatcccacaagtcccaaaa

SEQ ID NO: 2677 - DNA, 194 bp, Gossypium hirsutum
  Clone ID: LIB3493-007-P1-M1-E11
gttggatttttcttaaatgttttgatgtagctctcctaacttggtcttaacatctagactgggtatggtgtgttacatttagtggtattagagccaggtttacaaaacttgagttgtgtttctaggctctaatttttgttaaaatgtgttttgacagaaaaatttattcgaataactctgaaaactaattttat

SEQ ID NO: 2678 - DNA, 382 bp, Gossypium hirsutum
  Clone ID: LIB3493-007-P1-M1-E12
gaaaaaataaagaaaataaaaaatttcaaatgctctctgctagggttttgtcccaatcccttgcgccgccgtccgttcgccgtggtttcgccgcaaccagtggccggaggctcgccggactgggttttttaaccctcttcggagccgattcgaaggcaaagtaagccctcaccttcctatttcctttttgcaaatttaaacaccaaatcggaaaaggaaaataactctaaaatatttaaaaaactaataaacaccttaaaaagaaaacgatgttgatttattctctattgattttctttgtattttctttttctctctatttctgtctctgtttaagctcaaaaatcccccccccccttttttatagatttttcaaggcttt

SEQ ID NO: 2679 - DNA, 185 bp, Gossypium hirsutum
  Clone ID: LIB3493-007-P1-M1-E2
attacatgctaatctttaccttctatattgactgaatatctatttccaatgtggggtacttgtctaccgtagactgaaggaacaaatctctttattatcgattgctactaaacttcacgtacaattcttaacgacttagagcgcttactttaattcgatcttaaacctacacaacaaaattttaa

SEQ ID NO: 2680 - DNA, 144 bp, Gossypium hirsutum
  Clone ID: LIB3493-007-P1-M1-E3
atttctcaaaaatgagctccattgctttcaagcccttccacggcctccgccatagctccgccgtccacagccccacttcactaccaccaccctttccaacctgctgtcaaattcatgtgtagccgcaaacttctcaaactaaca

SEQ ID NO: 2681 - DNA, 179 bp, Gossypium hirsutum
  Clone ID: LIB3493-007-P1-M1-E4
aaaatggatccgtaacctcgggaaaaggattggctctgagggctgggcacggggggtcccagtcccgaccccgtcggttgccggcgcccttgctcgaacttgttcccgcggcaaaggcggtccgcccgtgcccgcccggggaccggcttggaaccggctccttcgggggccttccccgg

SEQ ID NO: 2682 - DNA, 342 bp, Gossypium hirsutum
  unsure (1)..(342): unsure at all n locations; Clone ID: LIB3493-007-P1-M1-E5
ctttctctaagaaacaagctctcagagaagacaatggtgggttttgaacaatgaagaagaagagaaagtgtgggttatgcttgttccatggcctgccattatgcttactatgcttccttttcaccttcagtaacattgagaggctttggtgccaagaacagagaacccaggccttttcaagtacatctttcttncattagcagcctgttagagcctctacatacccttgcttgaggctgaggctttggtctacacatttcgagctcaaactcaagtgctcatggaagggctaaagtatttgcatatccaagactacatcttccatggactactgtactacat

SEQ ID NO: 2683 - DNA, 319 bp, Gossypium hirsutum
  Clone ID: LIB3493-007-P1-M1-E6
ccgaagttggcataccttcaggcagttgtgaaagaagttttcagactgcaccccggcgttccgctcatcatccttcgtcgccccaacgaggcatgcgaggtagctggctaccatatccccaagcactgcatcgtttacgtgaacgtttggggaagggcaggggatcctaatgtgtgggaagatccactggagttcaagccggagaggttcatagggtcaagcgtggatgtgaaagggccaagactttaacctcttgccgtttggaacggggagaaagtcctgccgtggatggccactggctcatcgcatggtgcactat

SEQ ID NO: 2684 - DNA, 373 bp, Gossypium hirsutum
  Clone ID: LIB3493-007-P1-M1-E7
cgggatatgatacctccatcacaaaaaggaggccttgaggctgtagctcacttcccagcagctttttgtttggtctcactagggttattcttcacaatattgtcactgagtcaagctcgatacgatcttcgacacttatttttctcagctttgtgggctaccataagcattggtattgctacagttgtgaaggctaatggcaggattttctgcaaccgtcctcgtttgcataaaccacgacgttgattatatacatagcatattctgaaatgctatgacaaataaaaaacttccatcttgctgaatcatagttattctttcatacaatattttgtagtccatttagtttcaatacctcgattatatttttatt

SEQ ID NO: 2685 - DNA, 373 bp, Gossypium hirsutum
  Clone ID: LIB3493-007-P1-M1-E8
cggacgcgtgggatttttttttccttttctgggtgaatcaagttctttaaccatcagtgaccgtagcagcatactaaaatatgggtcgtggtctgggatccaacaccaagtctccggtaatggcacgattgctgttgttgagtatctgcataggaatattggcgaaggcggcatcagctcaagtgaagcccccaaatgcgttggcctcaaaactggggggctattgcggaaagagtacaatgtcctgctccatgaaatgcggttatctcggctgccttgcaggctgtgtgacatctccctcgatcggatgcggcactaagtgctttttcgaaaacaccagttgccaatttggctgcaccccctttgatattcg

SEQ ID NO: 2686 - DNA, 297 bp, Gossypium hirsutum
  Clone ID: LIB3493-007-P1-M1-E9
cccaccatggcctatctccccttcttcctcacctcccctgtttcaactttgaaccctttctctcaactccaaaacctcccacgtttattcacattactatctaaaacctgagcagctgaaatactaatgctttgaaaatggcttccacaactcaattcctcatctctctccctcctaaacccccttatttactatcctactcctccccttctaaacccaggtttattaacatcacctgctgcctcttcatacaacaagcttgaaatgatcaaaccactagcagcggcagcaacgccc

SEQ ID NO: 2687 - DNA, 353 bp, Gossypium hirsutum
  Clone ID: LIB3493-007-P1-M1-F1
ttcaagcgtcgcaatgacggaatctacatcatcaaccttggcaagacctgggagaaacttcaacttgctgctcgtgttattgttgctattgagaaccctcaggacatcattgtccaatctgcaaggccctatggtcagagagctgtactgaagttgcacagtacactggttgtcatgcaattgctggaagcacactcctgtacctcactaacagctcagcatcgtcagtgacctcgtcttttattctcacagatccagactgacaccagccatcaagaagcagtctggaacattccaccatgcttttgtgatctgactaccatgcgattgtgacatggtatctgcatacaagg

SEQ ID NO: 2688 - DNA, 319 bp, Gossypium hirsutum
  unsure (1)..(319): unsure at all n locations; Clone ID: LIB3493-007-P1-M1-F10
gaaagagagcagccccttcttccacatttctgcgaaccctaaagagaccaaaccctagccgccatgtagccaccgcaaacggcggtcgacggagggtggtcttctcgttctttaaccccgtttagacccctattcgaggatttgacactttccaccacgaagaatcaaaaagaaagttcccacctttgttgggttcgattttaatggagaagaactccgatgatacaccaacgattcaaggctcgggtctacggagggtcaatgaaggaaaaccttgctatntcggtgcaaggaagcaaccatcgggcagatggtacgc

SEQ ID NO: 2689 - DNA, 225 bp, Gossypium hirsutum
  Clone ID: LIB3493-007-P1-M1-F11
gtggcacactggctggcttgacatccttagatactgatgaagagattgtaactgctccaaatctatggagactaaacggcgtgtcattctagaggatgacattgttaccttcgcttccattcgaaccaatatgtgcattatgaattctcctaattacaatctattctcagcaaggcacatacttcctgcatcaagacacaatcatgtacaggcacttaatcaact

SEQ ID NO: 2690 - DNA, 349 bp, Gossypium hirsutum
  Clone ID: LIB3493-007-P1-M1-F12
gtaagagatgtcttcttcacttgcaatttcctcaagctcccttaggctcacccatgtcttcccaactaatggaaatgcaatcctctttaacgccatatccagttgcagaatctcctctttgaagtcaccgtctttgaacagtatcttcattagaatcccatacgggtccttcaagaaggcctcttttttcacttcctccaggcccttttctcctgtcatggaatggcaggattgcacggcaaagatggaaattgatgtacctgcatcggtcgcttacaaatgttactctgatcgtgaagcaattcccaattggatgccattcatttcatctgtccaggtattggaagac

SEQ ID NO: 2691 - DNA, 260 bp, Gossypium hirsutum
  unsure (1)..(260): unsure at all n locations; Clone ID: LIB3493-007-P1-M1-F2
gaaactttctctttcccggaacgtgatatgctccaagtgcaatggcaagggttcaaaatctggagcttcaatgacgtgccctggttgccagggttctgggatgaaggtttcaatcaggcagcttggcccctccatgattcagcanatgcaacatccttgcaatgaatgtaagggtactgnngagacgatcaatgacaaggaccgctgccctcagtgcaagggtgaaaaggttgttcaagagaaagaaaagtttgaagtca

SEQ ID NO: 2692 - DNA, 359 bp, Gossypium hirsutum
  Clone ID: LIB3493-007-P1-M1-F3
cggacgcgtgggatttgggatgctttatcttcagacatggctgccaagtcttgtcggggattaccagcagaccttggagcaaagatggttgttaaggaagctttgaggtcgaggggcctaaaggatgatacaacctgtctggttgttgatattatcccgtctgaccaaccggtcctaccttcaactccaaggaagaagcagaatatgctcagttcaattcttttcaggaagaaatctctaaaattcacaaaacaagactacaaaataaacttttctgccattggagttgttgaggaagctctttgaagagggttctgccgtgctttgccggaaggttgggtaaggatttccccacgaat

SEQ ID NO: 2693 - DNA, 403 bp, Gossypium hirsutum
  Clone ID: LIB3493-007-P1-M1-F4
cggacgcgtggggaaattgtgaaggaagtctcctcatatcttaagaaagttggttacaaccctgacaagatcccatttgtcccaatctctggatttgagggtgataacatgattgagaggtctaccaaccttgactggtacaagggtcccactctccttgaggctcttgaccagatcaatgagcccaagaggccttcagacaagccacttcggctcccacttcaggatgtctacaagattggtggcattggaactgtccctgttggtcgtgttgagactggtgtccttaagccctggaatggtgtgacctttggcccctctggtctgaccacttgaagtaagttgttgagatgcaccatgaagccctctctgaggctcttcccggtgacatgttggattaacg

SEQ ID NO: 2694 - DNA, 374 bp, Gossypium hirsutum
  unsure (1)..(374): unsure at all n locations; Clone ID: LIB3493-007-P1-M1-F5
attttgaaggaacttcataaatcttgtcaaaaggaagatggaacagacgatcaaaagaagggaagtcagcttctggaagtatatgcaattgaaattcaaatgtataccgagacanagaacaacananagctcaagcaattataccagaaagcacttgctgtcaagtctgcaataccacatcctaggatcatgggaataattcgtgaatgtggtggcaagatgcatatggctgagcgtcaatgggctgaggcagccacagatttctttgaagctttcaagaactatgatgaagctggaaatcangaacgtatacaatgccctaaaataccttgttctagctaacatgctgatggaatctgaagtaatccttttga

SEQ ID NO: 2695 - DNA, 331 bp, Gossypium hirsutum
  Clone ID: LIB3493-007-P1-M1-F7
gttttagagttgcagaagaactaattccccaaaatttgtttcagtaatggctgcctcagttatggcttcttcagttaccctcaagccttcattcaatgttgagaaacctggtgtaagaggggttccttcccttgctaggtcccctttttctttcaaggttgaagccagtggtggcaagaagatcaagaccgacaagccttacggaatcaatggtggtatgagcttgagggatggtgttgatgcctctggaaggaagggtaaagggaaaggtgtttaccaatatgttgacaaatatggtgctaacgtcgatgggtacagtcctatctacaac

SEQ ID NO: 2696 - DNA, 382 bp, Gossypium hirsutum
  unsure (1)..(382): unsure at all n locations; Clone ID: LIB3493-007-P1-M1-F8
tcttgatgacttttccgatggtgtataccgttggctcgacggtgctctattggcaaacaatccaactatcttctccatacgagaagcacaacttctgtggcctgatactaaaattgattgtatagtttcaattggatctggctctcttcctaccaaggctcgaaaaggtggttggcgatatctagatgcagggcaagtgctgattgagagtgcatgctctgtagatcatgcagaggaagctntgaggacgctgttacctatgcaccctgagatccattacttccggttcaatccagtcgatgagcgatgtgacatggagctggatgagaaggatccaacgatnttgggtagagttggaagctgcaacgaaggattacatcga

SEQ ID NO: 2697 - DNA, 326 bp, Gossypium hirsutum
  unsure (1)..(326): unsure at all n locations; Clone ID: LIB3493-007-P1-M1-F9
ctcaagtctccacttatgggaatatttgagaagcgtcgtgcacggaagttcttcatatatgttcaagattatgatgaaaaggatcctaaaactcacgagggaatggacttgacaagggtgtcaactagggcactaattgcgaaatatgggcttgatgataacactgtggatttcattggtcatgcattggcacttcacagagatgaccgctacctggatgaacctgcattggatactgtaaaaaggatgaagctntatgcggagtctcttgcccgttttcaagggggatctccgtacatatatccactgtatggattaggcgagct

SEQ ID NO: 2698 - DNA, 89 bp, Gossypium hirsutum
  Clone ID: LIB3493-007-P1-M1-G1
gcaaagataggaccattgagcaaagagagtgggaaagactggcaatttttcctggttttcgtagctaaaaactaaatccaaaagcaaat

SEQ ID NO: 2699 - DNA, 278 bp, Gossypium hirsutum
  Clone ID: LIB3493-007-P1-M1-G10
ctctgctcgaaatcttcttcattctcactctctctccactgaactcttgctaaacggtatcgttttagtcagtctttcatcaatggcgaaagaaccagttcgcgtcctcgttactggagctgcaggacaaatcgggtatgctcttgtacccatgattgctaggggagtcatgttgggtgctgaccagcccgtgatccttaacatgcttgatatcccacccgctgcggaggctttgaatggtgtcaaaatggagttggtggatgctgcatttcctcttc

SEQ ID NO: 2700 - DNA, 222 bp, Gossypium hirsutum
  Clone ID: LIB3493-007-P1-M1-G11
gaacaggcacacagctgctgacttgttggagtatgccaaccctcgaggtctcaccgtccttttgtatgctactgtgcaaaaaatcttgtttagatttagagggagaagaagcagaccagaggcatatggtgtgattttcagagatggatcagggattgaacatagagcatatcttaaatatgggtttaaaaacgaaatcattatatctgcgggagcattggg

SEQ ID NO: 2701 - DNA, 336 bp, Gossypium hirsutum
  unsure (1)..(336): unsure at all n locations; Clone ID: LIB3493-007-P1-M1-G12
ctaaagccccttttcttcccctctcattcggctgaatcaagaggcgcccttggactgccgtttggcctccatgtttagccgccggtcatcacgctaaagcctaatcaggctccgtccaatcacgaatccaaggctacgctcaaagatctcagaatcaacacccaaactccgattgcaacgaagccagtgaggattcgagggaaccaaaaacgaaggtaagccccttttttttctttcgaatatatgaacacaaaacccaggcgaacgaaactaaaagaaatccgagattntaatcgaaaaatcaacctgatcgatttatataattgatggtctttt

SEQ ID NO: 2702 - DNA, 351 bp, Gossypium hirsutum
  unsure (1)..(351): unsure at all n locations; Clone ID: LIB3493-007-P1-M1-G2
ggaaacttggaagcataatccctatttgccacaagatccttatgacaaagctaccgctcgattctggatcaagttcatcgacgaaaagtgctttcctcccctttggctagctgcatggagcgccgagaatgagcgagananagtgacgaatgaagcttgcgagtatctgaaaacgcttgaaagtgcgcttaatggaaagaaattctttggtggagaaaccattggaatggtagatattggtgctagctctgttgngtatttcattagggtcactcaagaaatttatggggcaaatctgctgtcagctgacaaatttccccaattattccaatggtctgaagatttcgcaaa

SEQ ID NO: 2703 - DNA, 299 bp, Gossypium hirsutum
  unsure (1)..(299): unsure at all n locations; Clone ID: LIB3493-007-P1-M1-G3
cggacccgtgggtcctcagcaggccggtcctatccgtaaaaacggctacatcgtcatcaaaggccgtccttgcaaggttgtcgaagtttccatttccaaaactgggaagcacggacatgctaagtgtcactttgttggaatcgacatcttcactgctaaaaagctggaagatatcgttcctttttccaacaattgtgatgtgccgcacgtcacccgtactgattaccaattgatcgacatttctgaggatggatttgtgagctngctgactgagagcggaaacactaaggatgatctga

SEQ ID NO: 2704 - DNA, 186 bp, Gossypium hirsutum
  Clone ID: LIB3493-007-P1-M1-G4
attattattggtaactttgtgtttttaattaggatgcactataacaaactccatctgtgtgagctataatgtgcatctttctttgaacaatttaatttgtttttaagggattaatattttgttttgcttatttattacttataattattcctttcttacattgaagaattacgataatgaagagag

SEQ ID NO: 2705 - DNA, 140 bp, Gossypium hirsutum
  Clone ID: LIB3493-007-P1-M1-G5
ctcaaggttaatggagacttccttgacagacaattgacctccaaacagcaaaatggttatacttctgtgctcttttacgcttcggtggtgccccgttttcacatgggtttgcgtcccgaaattcgacattctcagttcca

SEQ ID NO: 2706 - DNA, 445 bp, Gossypium hirsutum
  Clone ID: LIB3493-007-P1-M1-G6
tgcaggacaaatcgggtatgctcttgtacccatgattgctaggggagtcatgttgggtgctgaccagcccgtgatccttcacatgcttgatatcccacctgctgcggaggctttgaatggtgtcaaaatggagttggtggatgctgcttttcctcttctaaagggtgttgttgctacaactgatgttgttgaggcatgcactggagtcaatgttgctgtcatggttggtggtttcccaaggaaggaaggaatggagaggaaagatgttatgtcaaagaatgtgtctatttacaagtctcaggcttctgccttggaacagcatgcagctcctaactgcaagggtttggtgttgctaaccctgccaacaccaatgcattgatcctgaaggaatttgcaccttcaatcccttgcaaagacattacctgttgacagggctggatcatac

SEQ ID NO: 2707 - DNA, 174 bp, Gossypium hirsutum
  Clone ID: LIB3493-007-P1-M1-G7
gccgaatttctgacattataattgatgttgtaaagaaaatgacaactcctgtgacagtgttacatgtaacccccatgggagctttccgtagtgatgctcatgttggcacttggagcgataagcagtcggtagctgattgcagccactggtgtcttcctggagtgcctgatacat

SEQ ID NO: 2708 - DNA, 287 bp, Gossypium hirsutum
  unsure (1)..(287): unsure at all n locations; Clone ID: LIB3493-007-P1-M1-G8
cacgtcctcttaacgatatcctccgtttgcagttaagaaaagcaaatcatggctgctaccacggtcccagccgccgcaaggcagctatctcctaaagaagccgatatccagatgatgttggctgccgaggtccatctcggtaccaagaactgtgatttccaaatggagcgttacgtcttcaagcgtcgcaatgacggaatttacatcttcaaccttagcaagacctgngagaaagctcagcttgctgctcgtgtaattgtcgctatagagaaccctcaagatatcat

SEQ ID NO: 2709 - DNA, 213 bp, Gossypium hirsutum
  Clone ID: LIB3493-007-P1-M1-G9
cggacgcgtgggcttgcacatgggttagtcgatcctaagagacgggggaagcccgtccgacagcgcgtccagcgcgagcttcgaaagggaatcgggttaaaattcctgaaccgggacgcagcggctgacggcaacgttagggagtccggagacgtcggcgggggcctcgggaagagttatcttttctgtttaacggcctgcccaccctggaaa

SEQ ID NO: 2710 - DNA, 180 bp, Gossypium hirsutum
  Clone ID: LIB3493-007-P1-M1-H1
gaaattttctttctcgattttctctttagccaaaaaagatgcagatcttcgttaagactctaaccggcaagacgatcactctcgaggtcgagagctccgacacgatcgacaacgtgaagaccaaaatccaagataaggaaggcatccttccagaccagcagcgtctgatcttcgccggaa

SEQ ID NO: 2711 - DNA, 255 bp, Gossypium hirsutum
  Clone ID: LIB3493-007-P1-M1-H10
cacacttatgttcctgtaagacggaaaggatactggcagtttgatatgggtgatttcctgattggtaacgaaacaacaggattttgtgccggtggctgcagtgctattgctgattcagggacttctttgttggctggtcctacgggtattattgctcaaatcaatcatgctattggagcatctggggttgtaagtcaagaatgcaaggctgtagtttctgaatacggagagaagatacttgatatgctattagcg

SEQ ID NO: 2712 - DNA, 165 bp, Gossypium hirsutum
  Clone ID: LIB3493-007-P1-M1-H11
cgccgcctgcgtctctctcttcatctctctgaaccaaaaagtctttagcttttcgcttcgagagagaccatgttggtttaccaggatctcatcttcagtgacgagcttctttctgacttaattcccttccagggaaatgagaatgggattcttggggaaagttga

SEQ ID NO: 2713 - DNA, 253 bp, Gossypium hirsutum
  Clone ID: LIB3493-007-P1-M1-H12
cggacgcgtgggaaagtttcaaagttaactcttgcctttgtagaaaatggattttcttggaatttttcttttgtcttctcttgccatgttgaagacgattcatggacatggaggtgcatggtctaacgctcacgctacattctatgggagcagtgatgcgtctggtacaatgggtggagcatgtggctatggaaatctttatagccaaggctatggcacaagcactgctgcattgagcactgctctattcaac

SEQ ID NO: 2714 - DNA, 308 bp, Gossypium hirsutum
  Clone ID: LIB3493-007-P1-M1-H4
ttcgtatttcatagtcagttgagctccctccaattgcaaagccacccattacagtcccaccagtgactgttcctcctgtgaagccaccagttgacctccccccaattgcaaaaccgcccatcacagtccctccagtgaccctcccagtccctccagttactgtccctccagtgactgttcctcctgtaaagccaccagttgacctccctccaattgcaaaaccacccatcacagtcccaccagtgactgttccttctgtgaagccaccagttgacctccctccaattgcaaaaccacccatcacagtc

SEQ ID NO: 2715 - DNA, 274 bp, Gossypium hirsutum
  unsure (1)..(274): unsure at all n locations; Clone ID: LIB3493-007-P1-M1-H6
cccacgcgtccgctttggtatttttggggttccaatggttggtgcagatatatgtgggttctatcctgccccaactgaagagttgtgtaaccgttggattgaagtcggtgctttttaccctttctctagggatcatgcaaattactattctccaaggcaggagctntatcaatggaagactgtaaccaaatctgctcaaaatgcactaggtatgaggtataaacttcttccttacctctacacactcaactatttggctcatacaagcggagca

SEQ ID NO: 2716 - DNA, 379 bp, Gossypium hirsutum
  unsure (1)..(379): unsure at all n locations; Clone ID: LIB3493-007-P1-M1-H7
ctttgggtggccactaggtgtttggtgatagaactcagagaggttggatatttggttaaggtagtttgaaggtgggttatttgaatttcggggggtaacacccaaggttacacattgtggacatcacggctatatacaaagtttctcggtctctttttcatgtccgagctgtacgacgtaagggttgtgtgattgagagcaacccttcgccgcacggcgggcgtggagctttgccttccgaaggcggcagtccttccgatctcctcttnctttgcttgtggtgggattgtcttttagaagttgggtaccctatttttagctagcttattagtctgtgaaatattactatcgaaaaaacttggttttcggtgttttttgg

SEQ ID NO: 2717 - DNA, 202 bp, Gossypium hirsutum
  Clone ID: LIB3493-007-P1-M1-H8
attcaatcctcctttttctattcaaccataatgtcttgcttcattagcaaatacgccgatgagttggctaaaaacgctgcttacattggcacccctggaaagggtatccttgctgctgatgaatccaccggcaccatcggcaagcgtctttcaagcattaatgtagaaaatattgaagaaaacaggcgtgctctccgtgagc

SEQ ID NO: 2718 - DNA, 292 bp, Gossypium hirsutum
  Clone ID: LIB3493-007-P1-M1-H9
ggccgccaacacactaatgagctgtggcatagccaccacatttccttcacttctttcctcatcaaagtccaagttcagtggcgccgccgtatcgttgcctagtgctgttggtaccaatgttggccaccgtgttagcatgtcagctgattggatgcctggtcaacctagaccaccttaccttgatggctcagcaccaggtgactttgggtttgacccactaagacttggtgaggtccctgagaaccttgagaggtacaaagaatctgagttgattcactgcagatgggctatg

SEQ ID NO: 2719 - DNA, 164 bp, Gossypium hirsutum
  Clone ID: LIB3493-008-P1-M1-A1
gtggcttatcaatgttgaaacatgatgctgaaggcaaagaatgcattgaaagaatcgtgaagcgtttgcatgctttgagttatcacatgcggagttacttctggcttgacttccaacaactaaatgatatttatagatataaaactgaggagttttctcacact

SEQ ID NO: 2720 - DNA, 272 bp, Gossypium hirsutum
  Clone ID: LIB3493-008-P1-M1-A10
cggacgcgtgggtagaatttgaagccttcaatggcgagaaatcatccaagcctgagactctgaacgctttccatatcatttccttatccgagggcttcgatttgtcaccgttgtttgaagagaagaagagagaagagaaagaggagctaagattcgctacaacaaggccagcgagcagtgtaatatcgagactggaagaggtggccaagtcgatgaaattcaacgtcaagaagagcgagtcaagtgtaagactgcagggtcaagaatgtgga

SEQ ID NO: 2721 - DNA, 249 bp, Gossypium hirsutum
  Clone ID: LIB3493-008-P1-M1-A11
aggaactacagcattccagaggtggacaagctgaaagccaagttcattgctggaagaattatccctgcaattgccacttccacagctatggccactggtctcgtctgcctggaactttacaaagctctggatggaggacacaaactggaagactaccgtaacactttcgcaaaccttgcactggctctgttctctatggcagaaccggtttcacccaaaaccatcaaacacggtgacatgagctggact

SEQ ID NO: 2722 - DNA, 421 bp, Gossypium hirsutum
  Clone ID: LIB3493-008-P1-M1-A2
aaaaaagatggcgtctgtaataaaatctgcaatcttaattctgtcggagtttttatctgtaagcttcagttcgggtgttaggttgctccaggaacagcccaatgatgacctcaaaaacatggacgctattcctcccattgatgcactcaaccctaccgagttcaatggacccggtgttggcattcacgaagatcatgttgtcccaaaaggttccgaaattggtactcttggttttggttctgaaggtggtcctgaaaaatgttgttcttctggatgttccggtaattgtaatccctggggtttcgttctaccatttcctcaaattccagaaatcccaagaattccacagatcccacagatcccacaaattccacaaattccactaatcccacagatcccacaagtcccacaaatcccacta

SEQ ID NO: 2723 - DNA, 353 bp, Gossypium hirsutum
  unsure (1)..(353): unsure at all n locations; Clone ID: LIB3493-008-P1-M1-A3
actactgctcgattgggatcattcaaaatgttgacaaacaaagcaattgaagccaatgatgggaagcccttacctctatatcagaaagctntgtgtggtctgactgctggtgctattggagcctgtgttggcagcccggctgatttggcacttatccgtatgcaggctgatgctactttgcctgttgctcagcgcagaaattacaccaatgcattccatgcactctatcgtattgttgcggatgaaggggtttggctctttggaaaggtgcaggcccccaccgtagtcagagccatggcattgaacatgggaatgcttgcctcttatgatcaaagtgttgagttttgcaagga

SEQ ID NO: 2724 - DNA, 311 bp, Gossypium hirsutum
  unsure (1)..(311): unsure at all n locations; Clone ID: LIB3493-008-P1-M1-A4
cccacgcgtccgaattcctctatcagctgagcctagtccaccacaatcctggaactctgatccattagatatgttagatgttggtcttggaactcaagtcaatgaggttgatactttggtcacggtttccaaaagtgggcgtaaatgtgccaagagattggatagtgtttggngtgcttggtttttctttacctattattttaagcctgtcttcaatgagaagtccaaagttaaagtgactagggatgaagtggagtttcagggtttgataagtcagatctcgagctagatgtgtttttagtacaacatga

SEQ ID NO: 2725 - DNA, 178 bp, Gossypium hirsutum
  Clone ID: LIB3493-008-P1-M1-A5
gaatgtcacaactgatattaaagtggatccctactccaatctctataccaccataaccgttgatcaacctgcacccgggctgaaagcaatctttagcttcagagtccctgatcagaggtctggcaaggttgaactccagtatttgcatgaatacgcagggataagctcaagcattgga

SEQ ID NO: 2726 - DNA, 167 bp, Gossypium hirsutum
  unsure (1)..(167): unsure at all n locations; Clone ID: LIB3493-008-P1-M1-A6
cgcaaccatcaaggatcatccgcgaaatttcactctatggcacccataaagggcattctttccttgcanagggcagctntgttaagagctagcggtgaaaggtggaaactaggcactagatcanttagtactcaaggagcaacaactgctgatgctccacaggcacc

SEQ ID NO: 2727 - DNA, 336 bp, Gossypium hirsutum
  Clone ID: LIB3493-008-P1-M1-A7
tcgcttccggccgctaacatgcgctgccgccgtcttcgcctcaaacccagcgcggctggtccctcgcccaccggaccttctcaagtggatcaagagggaaggtggcttcgtgcacgaggctgtaacaattacccaggataccacctaccggctaggtcttgtcggctctggaggaatccccaagggttctgatcttatcgtcctccctgaacacgttcccttgaagtttcaatcagacaaagacgatgaggctgactctgtctcgctccctttgtctaaccgcgttccaaaggaactatgggcaatgaagctgggtctgaagcttctacaagaaag

SEQ ID NO: 2728 - DNA, 426 bp, Gossypium hirsutum
  unsure (1)..(426): unsure at all n locations; Clone ID: LIB3493-008-P1-M1-A9
tgataacaaagccttcgttgttggggatgttctcgtgttcaatttcactaccggacaacatgatgttgcagaggtgacggaaactgcttacgatgcgtgcaccactgccaatactatatcaaccgtcagcaccggtccggcaaggattactcttaacaggaccggcgaattttacttcatttgtgctgtccccggtcactgttccggcgggcaaaagctcaacgtcgaagtcagaaatgggaacaacggtaccgctgctgttcccgcacctggaccgagtcccaccaccacgcctgtagctaccagccccaccaccagtacgccttcgaccggtgncacgcccacctcgcctggaacttcaagtcctnctcctgggaccaactcagcttcttcccttgtttctactctgtctcctgtcttcttcat

SEQ ID NO: 2729 - DNA, 383 bp, Gossypium hirsutum
  unsure (1)..(383): unsure at all n locations; Clone ID: LIB3493-008-P1-M1-B1
attccgcttatgccttccagcaatcataacttncaagatagcaatatggaagaaagcaaatttaatacttctgttcttttatagaggaagcttatccttcccttctactncttcacattgttttgcataattcttcctctcaccatgtttgtaccagaggctgagctccctgtctgggtcatttgttatgtacctgcatttatgtctatcctcaacattcttccagcccccaaatcattccctttcattgtcccttaccttctattcgagaacaccatgtctgtgaccaaattcaatgcaatggtatctgggttattcaagttgggtagctcctatgagtgggttgcaccaaaaaggctggcggtcatcagaatctgacttat

SEQ ID NO: 2730 - DNA, 224 bp, Gossypium hirsutum
  unsure (1)..(224): unsure at all n locations; Clone ID: LIB3493-008-P1-M1-B10
acggttnttcctttttctaattntgactggatctcatgaaatgtaaagtttctgaaatggaagaaggagggaatggagagcttagcatcgacactctcaaccttaatgctcttccacaagattgtatcgccaccatcatttcctttacctcccctcgagatgcctgtagaatgtcgattgtttcaactatatttaaattggctgctgaatccgatgctgtttgg

SEQ ID NO: 2731 - DNA, 264 bp, Gossypium hirsutum
  Clone ID: LIB3493-008-P1-M1-B11
gtttcattagctcccgaggtattataagacgagacccaagtatagttagagtatttagagtatttaaatggcatagattaattagtagattgtgtctcacgtatatacctttactaagtaaaaaaaaaagaccacgttggttatatcaattcgggagcaacaaaaattttagtttaccatgggtaaggacactattgctgacataataacctctatacgaaatgctgatatgaatagaaaaggaacgattcaaataggatctac

SEQ ID NO: 2732 - DNA, 278 bp, Gossypium hirsutum
  unsure (1)..(278): unsure at all n locations; Clone ID: LIB3493-008-P1-M1-B12
cccacgcgtncggttggagaggtttgagaatgttcattgcagcaaccacaaagagatatcgtgcagttaaggaagtcgggaagattaaaatgagcgttggtgttattgcatactatcaattagttcaagtttgtcaggccgagtatttccgtcagttgctaaaaccagttacgtagtctagtagttagcaactcttggaaattgggatctgggggagtcttccatttggttggtttatacgtaggcttttaaagaatgaaatatctgatattgttgat

SEQ ID NO: 2733 - DNA, 418 bp, Gossypium hirsutum
  Clone ID: LIB3493-008-P1-M1-B2
cggacgcgtgggctctatattgctggtgttgcaggaaaatccaatccagagattcgttaccgatggtgggagtttttgaagtaggagctgttccatttaatcccgacggttggggtccacccgaatcaaccaccgctaccccaccaagcacgaccaccacactcccttcccatgtgccttacgccaccttctcccgttccgagaggctcggccgaatcgctgacttcacccgttctttctcctcttcgaacgccaacgcatctaatcgtccttcctccgggaaacccggctcagccgactcccccttcgatttctctctcgacctcgacgccttccctctcgctaaccccgacgatggttccgccttccgtttagtcgacacgaagcctactcctcggcctaaatttggccctaaaat

SEQ ID NO: 2734 - DNA, 361 bp, Gossypium hirsutum
  unsure (1)..(361): unsure at all n locations; Clone ID: LIB3493-008-P1-M1-B3
agataccaatttgaaaagttaattgaaacttgagaggaattgaacatatggttatcaaagataaagaactcaatgtcattttccatgtcatgtcaactaaaacaagcacaatatatgaatatatatatatatatatatatatagagagagagagagagagagagagtttacaagttgctgttggcattataaagattagaaaacaaagtaacaacttcccaatatgaatgtcatgtagttacaggctgcgaagaagaatgccttcaaaagtaattccaggaccaaatgctaaggcaagcccccattcttctcctcctnctctctttaactcttcccttatgtattccatcacatagaaaat

SEQ ID NO: 2735 - DNA, 203 bp, Gossypium hirsutum
  unsure (1)..(203): unsure at all n locations; Clone ID: LIB3493-008-P1-M1-B4
cgacgatataaagcaaataggggtggccttaataccaacaactacaactagcaaggctcttccggcacctacagaggcaaacccagagcctaaaagcgaagtatcggcagaaccgcctccccaaattaatgcagtacccgaatcagaatccagagcgaaaggaagctcanggactccgagaccgctttcaccgtatccttcgt

SEQ ID NO: 2736 - DNA, 250 bp, Gossypium hirsutum
  unsure (1)..(250): unsure at all n locations; Clone ID: LIB3493-008-P1-M1-B5
gnggaaaaaagaaagctaaaaactcaactttagttgtcgtttaatggaaactctttcccatacgatcaccacttccgcttctgcgaaaccccgccttcctcgaaacgacaacgttcaccgtcgtctcctccgtttccgccatggatttagttccttgaatctcggtacactgagatcgcagaggagtagtagtggtttcttcaaggttgaatgtagtcaacagagctcgaaaaatngtatcgattttact

SEQ ID NO: 2737 - DNA, 227 bp, Gossypium hirsutum
  unsure (1)..(227): unsure at all n locations; Clone ID: LIB3493-008-P1-M1-B6
ggatcatttgaaagatttaaaaagaaaaaaagagagatggcgtctgtaataaaatctgcaatcttaattctgtcggtgtttttatctgtacgcttcagttcgggtgttaggttgctccaggaacagcccaatgatgaccccaaaaacatggacgctattcctnccattgatgcanctcaaccctaccgagtgaatggacccggtgttggcattcacgaagatcatgt

SEQ ID NO: 2738 - DNA, 330 bp, Gossypium hirsutum
  Clone ID: LIB3493-008-P1-M1-B7
gggggatctaacgtggaaagcgtagcacccaccgactcaccctgccgacactaaactctgggaaaaccattcagatgagagttttatgattgttaaatgaaacttgaaattgcaatatccctctcctttgcttgccttgggactttgggttgttagttaacgaaaagacgatgaggtttttccttcacacccacccacaattaatggcgattcccatgagactccaatcatttgcttctgctcagaaatgggaaggtggggtttcaatggttcaaggagcttctcgaggaattggtctcgaatttgttaaacaaatgctggaaaagaatg

SEQ ID NO: 2739 - DNA, 436 bp, Gossypium hirsutum
  Clone ID: LIB3493-008-P1-M1-B8
cagtaactcactcactcactcactcttctaatctctgatactattacagagcttttgaacttgttgaaaataaatggctcaaggctcagctgcagttcccagtactgagttattagaatggccgaagaaagacaaccgccgcctccttcatgctgtctaccgtgtcggtgacctcgaccgtactatcaaattttacaccgaatgttttgggatgaagctgttaagaaaaagagacattcctgaagagaaatattccaatgcctttcttggatttggaccagaagaatctcatttcgtcatggagttaacatataattatggagtaacttcgtatgatatcggaaccggtttcgggcattttgcgattgcgacagccgatgtgtacaaaatggtcgaggacattcgtgcgaaaggcggtaatattactagagagcct

SEQ ID NO: 2740 - DNA, 450 bp, Gossypium hirsutum
  Clone ID: LIB3493-008-P1-M1-B9
caacaacacagttatggttcgatgcggccactgcacaaatcttttgtcagtcgacatgcgtggcttgcttcttcccacagctaatcagcttcaccttgcccattctttctttaccccacagaatctcctggaagagatccgaagttgtgcaccaccaaatatggtgatgatcaatcacccaaacccaaatgacactgttattcgtggagcagctgagcttgaggagatagccaaacctcctgtggtcaacagacctccagagaagagacagagagtgccgtctgcctacaatcgcttcatcaaggaagaaatccaacgtatcaaagctgggaatcctgatataagtcacagagacgccttcagtgctgctgccaagaattgggcccacttcccgcgcatacatttcggacaaatgcctgatcaagctgttatgaaaatgaaaaataacgt

SEQ ID NO: 2741 - DNA, 390 bp, Gossypium hirsutum
  unsure (1)..(390): unsure at all n locations; Clone ID: LIB3493-008-P1-M1-C1
ggcaagtgatgatggggaaaagggtgttcggagacggcagcggcggcgccgatccagaagcggatgagttcaagtcgatggtggtggaactgatgcagttagccggggttttcaacatcggcgacttcattccggcgcttgaatggctggacctgcaaggggtgcaagctaaaatgaagaaactccataacagattcgataggttcttgagtggcattcttgaagaacacaaaaccaaagctcgacaaagtaatgggcaagtgaaacacaaggatttattaagtacgttgatttcattggagaatgctgacggtgctgaaggtggaaagctctccaacaactgagatcaaagcattacttttgaacatgttcacagcangaactgataca

SEQ ID NO: 2742 - DNA, 125 bp, Gossypium hirsutum
  Clone ID: LIB3493-008-P1-M1-C10
cattaccaattcccttcaatttctccattttctctgaaatccaatggatccagtaagcagttggggcaattcctccctcgactccgtcgatcccgaaatccatgacctcatcgagaaagagaagc

SEQ ID NO: 2743 - DNA, 330 bp, Gossypium hirsutum
  Clone ID: LIB3493-008-P1-M1-C11
cggacgcgtgggttctaaatggagacgatgaagactgttgtttgctcattaatcagcataatgatagggtcaatgacacagagatgcacccaatcgaaccgccttggttaaatgagtttagtggagtaatgagaaatgtgtatgggccggttacggctgcaaagactatttatgaggatgaagaaggatacctaattatcatcagcttgccttttgcagaccttaaaagggtgaaagttagttggtggaataatctaacgcatggtgttgtaaagatatcgtctatgaacacagcttgcatgcccttttataagagaaacgatagaacat

SEQ ID NO: 2744 - DNA, 242 bp, Gossypium hirsutum
  Clone ID: LIB3493-008-P1-M1-C12
tcggattcggtgccaatcgttctttccctttattaaaaccccgaatctaatttcatctcattttccatttcattttcattttttcattttcttgttctttcttctttgacttttcttctacagagaggaaaaggggaggaaagaaaaaaaaattatttttgcaaggatgcagaggcgtcaagatcaacggtcgagatctgttaaacccattacggttcatgggttagctcagtctggggatc

SEQ ID NO: 2745 - DNA, 341 bp, Gossypium hirsutum
  unsure (1)..(341): unsure at all n locations; Clone ID: LIB3493-008-P1-M1-C2
aaaatatccttcctttcgtgaaagatcggaaaatgttgatcttgttgttgagatttccctgcagccatggaatgttttcaagccagatggggtcattttattttccgatattctcactcctctctcagggatgaacataccttttgacattatcaagggtaaaggtccagttatctttgaccctatagccactgctgctgatgttgatcaagtgagagaatttagccccgaggggtcagttccatatgttggtgaagcattgacaatcttgaagaaagaggtagataacaaagctgcagntntgggtttgttggcgctccattcactctagcatcatatgt

SEQ ID NO: 2746 - DNA, 408 bp, Gossypium hirsutum
  Clone ID: LIB3493-008-P1-M1-C3
agagcatttatataaattagttgaagaaaaagatggaggtcctgcttggattcacatgatggataagtccaccccaactatgggatatcaggcttggcaaagagatcttgagattggtcctacacaatatcgtagccggactgttttcgatgatgccactcctgagatggtgagggatttcttttgggacgatgaattccgatcaaaattgaagtgggatgaaatgcttcttagtgccgaaactctcgagtcgtctcccactgacggcaccataggggtccagtgggttcgaaagtttcccttcttctgcagtgacagagaatacttgataggtcgtcggatttggtcatgtggtcggacatattactgtgtacaaaaggagtccatatccctctatcctagaaaaac

SEQ ID NO: 2747 - DNA, 328 bp, Gossypium hirsutum
  Clone ID: LIB3493-008-P1-M1-C4
cggacgcgtgggcgaaaacctaaagattctctctcccaaaccaaaccttcaaatttcagcaagagagagagagagagaacttacatagctcagacttcgatcatcaatttagggtttcttaattcgattccccgattacccgataccccaattttacagatcaggtctgagtgttctagttgttcggctgtttctatccgctaagtttcatgtctgatcttgacatccagattcctactgcctttgatccgtttgctgatgcaaatgctgaagacgctggtgctggtgccaaggaatacgttcacattcgtattcagcaccggaaccg

SEQ ID NO: 2748 - DNA, 294 bp, Gossypium hirsutum
  Clone ID: LIB3493-008-P1-M1-C5
ttctgatgttgttgtccctaataatactctcttgaagattgttgatcctggcaccagattgatagatgcactcgagatgatgaagcagggtgtgagacgacttcttgttccaaagagcaaggtatggaaaggcatgagcaagcgattctcaattctttataatgggaaatggctcaagaacattgataacggtagcagcaacaacctcattgctaatgccaaccgcccttcctcttcatctgctgccgcttacatgcgtgacaagttttgctgtctctcaagagaagacatgat

SEQ ID NO: 2749 - DNA, 384 bp, Gossypium hirsutum
  unsure (1)..(384): unsure at all n locations; Clone ID: LIB3493-008-P1-M1-C6
gtttaatttcctcatctccgagctaccgctaccagtgaaagccgcactattcagtcttcggtcgccgctccctctttctatctattcaatctgaggtatggcaatggccgtggcagccaccgagaccagcaaagacccgacccaacctaactacgaagtcaagcttttcaatcgctggtcttttgaggatgtccaggttactgatatctctttgagtgactacattggtgcccaagcttcgaagcacgcaacctatgtgccgcacactgctggaaggtactcagtgaagcgtttccgaaagctcaatgcccaatngttgagagggctacgaactcactgatgatgcatggccgaaacaatgggaagaaacttatggagttagga

SEQ ID NO: 2750 - DNA, 420 bp, Gossypium hirsutum
  unsure (1)..(420): unsure at all n locations; Clone ID: LIB3493-008-P1-M1-C7
gngatatattgctatatggcagaagcccttggacaacagttgttatttaagccgtgaagccgggaatagtcctcctttgtgtgatcaagatgatgacccagataatgtttggaatgttgacctgaaggcctgcattagtcgacttcctgagaatggatatggtgcaaatgttgctccttggcctgctcgtctgcaaattccacctgacaggctgcagagcatacaaatagattcttatatagccagaaaagagctcttcatggcagaatcaaaatactggaatgaaatagtggatagctatgtccgtgctcttcattggaagaaatttcaactgagaaatgtattggacatgagagctagctttggaggatttgcagccgcgataattcagaatcaacttgatgcttgggttcttaaacg

SEQ ID NO: 2751 - DNA, 481 bp, Gossypium hirsutum
  Clone ID: LIB3493-008-P1-M1-C8
cggacgcgtgggcggacgcgtgggttttgtattcttcttcatggctaattagtcttatgaggtcacccaaagggattgttaggaggatagaagaaggggtttttcaaggaaacctttgtgaaaaataccccaaatggcttctttcccaaaaggttctccaccttcatcacgtgtttcatcaccaccttcatcagcgggggataagtccacggcgccaccgccagttccagctttctcgtcaccaaacccaccttcggcgccaccgtctcccccagcagagtcaaattcaccttcaccaccttcatattcaagtacttcatcctcttcaccaccgtcgacacccgctttgctgccaccgacatctccttctacatcaccgtcaccaccatcgaccttgtcctcgtcacctttatcggcatcgtcatggacatcaccgacaatatcgacgtcaaaatcaccctcatcatcatcaacaagatca

SEQ ID NO: 2752 - DNA, 346 bp, Gossypium hirsutum
  Clone ID: LIB3493-008-P1-M1-C9
ttcgccattcactccgttcacccctttttttttcattttgcctgatttttcgagttttagatttcttatataatcaactacctaatcctctcgctctctcaaccacaagctaactagcaaacacccacacatactaacatctatggggagttcagggcagcaagtcttctggaaattggcggatcacccaacacttccaaaggggaagacccttgctctcatcgttctcgatggctggggcgagtacaaacccgatgagtacaattgcattcatgttgctcaaactcccaccatggattctctcaaacagggtgcccctgaaaagtggagattaatcagagctcat

SEQ ID NO: 2753 - DNA, 140 bp, Gossypium hirsutum
  Clone ID: LIB3493-008-P1-M1-D1
gttatgattgttattttgctatcaaacaattcctaactgaattagatggttttgaagagttgactggagtaatcgtgtatgttgcaacaaggatagtactcatggaatcatattgcattattacgatagtatctatactt

SEQ ID NO: 2754 - DNA, 237 bp, Gossypium hirsutum
  unsure (1)..(237): unsure at all n locations; Clone ID: LIB3493-008-P1-M1-D10
gaaagtaacagatgcaagagagcgcanaataagggcagagagagctccgtggcttgcaatggataccgtcgattcttagatctcttaaccctagccatttttattttttatcattctgatcgagcattgtttctaacgaagaaatcaacttttaggtttcatttgattcagttctggctggttttctgattttacctgcatttcgcgttctatttcgtcgtggttgctttgctgatt

SEQ ID NO: 2755 - DNA, 177 bp, Gossypium hirsutum
  Clone ID: LIB3493-008-P1-M1-D12
ctgaaccaaaaagtctttagcttttcgcttcgagagagaccatgttggtttaccaggatctcatctccagtgacgagcttctttctgactcattcccctacaaggaaatcgagaatgggatgctgtgggaagttgagggaaagtgggttgtgcaaggagctattgatgttgacattg

SEQ ID NO: 2756 - DNA, 108 bp, Gossypium hirsutum
  Clone ID: LIB3493-008-P1-M1-D2
cagggtagctacacgtacttcagcacctcaacctcgatttccacctcaccaaggacgaggagacgggcaagcgtaagctcaggatcgaggcctggttcggtactagga

SEQ ID NO: 2757 - DNA, 357 bp, Gossypium hirsutum
  unsure (1)..(357): unsure at all n locations; Clone ID: LIB3493-008-P1-M1-D3
aaaagacttcttctttatttccctaaaagaaaagttgatctttgttagtttggtgcgattctctttagccatttcctttatgcatgtagatgctctttggtagccttaactcgccacttcgactcacttcaatccatggctaataaccccaacgagtccgccgctgatgatttcctcgagcaaatcctaggactctcccactttgcgcctactgagactggcttagcggagcccgacggtagattgtctggaaacgccacgacggctggagcgccaatgcttctgcagctcagctccggggtggcaccggacacatcggcgctatanggcggggtggaggggggcgtttcacggaca

SEQ ID NO: 2758 - DNA, 396 bp, Gossypium hirsutum
  unsure (1)..(396): unsure at all n locations; Clone ID: LIB3493-008-P1-M1-D4
tttgaatcaaaagaggatatggggttgttgatcatcatcattagcttgatgggtgttgtttggttttggtacaaaatgaagaagatgatgagaaaagaagatagaggaaccaacaagagtggcggcagtggcggcggcggtggcggtgtantgccaaaagggaacttgggttggcctttcattggtgaaacccttcatttcattgcttctggttatagntctcaaccggtcagtttcatggacatacgcaagcttttgcatgggaaggtattcaaaacacatntattgggaacacccatcattgttccacagatcccacgtaaacaaggtgtgtgcaaaccatggcacacctcatnctgctaccctaaatcatactgagtactggtaacactcatc

SEQ ID NO: 2759 - DNA, 367 bp, Gossypium hirsutum
  Clone ID: LIB3493-008-P1-M1-D5
tttggtagtattttttagctttgaatttgaatttgtggtatatagttaccatatataatttacttgctgcatggatggatgaaatctgggtcccttgtttgaggctgaatggtagggtcagtgttgtcaaggcatgtacctaggtgcgtctgtgcctttgcagcattcaacagaaatgcctcagacctttccaggcgaggcccatttaatgaggcatagacgccttgtgtgccttggagctcttttttgtaaggcagtagacttagataaacttggatggttgaactttttactaaaaaagaaagggataatgtcaaacttgactggccaatatattatatataagctgtatacttgtaaaaactgg

SEQ ID NO: 2760 - DNA, 289 bp, Gossypium hirsutum
  Clone ID: LIB3493-008-P1-M1-D6
taaaaagaaaaaaagagagatggcgtctgtaataaaatctgcaatcttaattctgtcggtgtttttatctgtacgcttcagttcgggtgttaggttgctccaggaacagcccaatgatgaccccaaaaacatggacgctattcctcccattgatgcactcaaccctaccgagttgaatggacccggtgttggcattcacgaagatcatgttgtcccaaaaggtgctgaaattggtactcttggttttggttttgaaggtggtcctgataaatgttgttctttctggatg

SEQ ID NO: 2761 - DNA, 467 bp, Gossypium hirsutum
  Clone ID: LIB3493-008-P1-M1-D7
ccgccgtacctgaacggaaagtcgctgtcttgggcgcagctggagggatcggccaacccttggctctcctcatgaagcttaaccctcttgtttctcaactggctctctatgatatcgctaacactcccggtgttgccgctgatgtcagccacatcaactctagatctgaggttgccggatatgtaggtgaagagcagttggggaaagctttggagggatgtgatgttgtcatcattccagctggggtgcctagaaagcccggtatgactcgtgatgatcttttcaacattaatgccggaatcgtcaagggtctatgttctgcaattgctaaatattgccccaatgcacttgtcaatatgatcagcaaccctgtcaattcaactgttcctatcgcagcttgggttttcaagaaggcagggacatatgatgaaaagaaagtgttgtgtaaccaccctgatgggtcggct

SEQ ID NO: 2762 - DNA, 426 bp, Gossypium hirsutum
  unsure (1)..(426): unsure at all n locations; Clone ID: LIB3493-008-P1-M1-D8
agaagctcaaaatcaaaccctagtcggttcctctaacgccaacggagccccgaaagaaacgggtcaagaagaggatttggacgacgagccgttcgagaaacttctggaaccattcgggaaagatcaattgattacccttatcaggagagccgttgataagcacccggaatttatctcctcagttcgggagttcgcagatgcggacccgtcccatcggaagatcttcgttcatgggctaagttgggataccactgcggaaaccctcaccgccgaattttgtaagtatggggaaatcgaagaatgcaaagctgttaccgatagggtttctgggaaatctaaaggttacgcctttattctatttaagcattcgagtggggcacgccgggctttgaaacaaccncagaagaagattggaaatcgaactac

SEQ ID NO: 2763 - DNA, 442 bp, Gossypium hirsutum
  Clone ID: LIB3493-008-P1-M1-D9
tgattaccaattgatcgacatttctgaggatggatttgtgagcttgctgactgagagcggagacactaaggatgatctgaggctcccaactgatgaaaacttgttgaaacagatcaaggacggtttcgctgaggggaaagaccttgtggtgtctgttatgtcggcaatgggggaggaacagatttgtgcactcaaggacattggtccaaaatagtaagagacttttatttgcagcctgtttattgcgattttaaatggaaagatttttgttaaaaagcgtttatagtttgtgcctgatataaatggtgttggattgtttatcatgtttggtacggataccaaaaaaaaaaaaaaccaccagaaaatagttgtttgttgtgctatgttaaaactgttcctctttgggttaaagaaaccggcacgttattatattgatatttat

SEQ ID NO: 2764 - DNA, 287 bp, Gossypium hirsutum
  unsure (1)..(287): unsure at all n locations; Clone ID: LIB3493-008-P1-M1-E1
gccgaactccgaatccagaaacaccaactgaaacataacaacaaanatggcggccgggaagaagacaaagaagacccatgaaagcatcaacaacaggttggctctcgttatgaagagtggaaaatacactcttggttataaaacagtgcttaagtctctaaggtcctccaaagggaaactgattattatttccaacaactgtccaccattgaggaaatctgagaatgagtactatgccatgctttgtaaaggtggggtgcatcattataatggaaacaataatgatc

SEQ ID NO: 2765 - DNA, 430 bp, Gossypium hirsutum
  Clone ID: LIB3493-008-P1-M1-E10
ctcagtaagcccgttattgcattcgctacttcgaagacatgttccaagcttccatctctcaaacttggaacagtcctagtcgactcgccggagttcctctctttcttaactcaaccaaacatcggtaacgaggtcttcgatagtgtcaaggtgagtcagcacgacacggcagctatcctttattcttccgggacaaccggactagtcaaaggcgtactgctgagtcacctcaacataatcgcgttggttgctgggtattatcacctacgagaaacccctcacgaacaggaggaatcgcacccagagtcgtttttcactgtgcctttatttcacgtgtttgggttctttatgttagcgagggcattttcaatgggcgaaacggtggtttcacggacagatttgaatttgagggaatggtgagaccattgag

SEQ ID NO: 2766 - DNA, 435 bp, Gossypium hirsutum
  Clone ID: LIB3493-008-P1-M1-E11
gctattattgccattaagcctacacaagaaggatcatggaatcatgaagcatatttgttatttcctgttcatttggatggaacattactggacaattccaatgctatgaaagctaaaaaggaattcttttctacctcagatgttcttcaaatatttcggcagctgtgtgcagggctgaaacatatgcatggtcttgttcctccatatgcacataatgatgtcaagccaggaaatgttcttttaacccgaagaaaagggcaagcaccacttgctatattgatggatttcggtagtgctcgtcctgcaaggaaacaaatccgctctcgttctgaggcactccagcttcaggaatgggcatctgagcattgttcagcacctttccgagctcctgagttgtgggattgcccaagcgatgctgatattgatgagagaact

SEQ ID NO: 2767 - DNA, 395 bp, Gossypium hirsutum
  Clone ID: LIB3493-008-P1-M1-E12
gattgattctttctttttcttgtggtctccaaagcatctctgttatatcggttattttctctcaagaactgacgaaaaaatccgaatagattaaaacttaagaaagatcaaaagatgttcggaagagcacctaagaaaagtaataacaccaggtactatgagattctgggtgtttcgaagaacgcttcccaggatgatttgaagaaagcttataaaaaagccgccattaaaaaccatccagacaaaggcggtgatcctgaaaaatttaaagagttggctcaagcttatgaggtattgagcgatcctgagaaacgtgagatatatgatcagtatggtgaggatgcactcaaggaaagaaatggggtgggtgccgtgctcatgatccgttgacatct

SEQ ID NO: 2768 - DNA, 439 bp, Gossypium hirsutum
  unsure (1)..(439): unsure at all n locations; Clone ID: LIB3493-008-P1-M1-E2
cttgccttgcccttttactttttcttgcagatcagatttatcttccatgatatttctttcaagttttctgccttcggaatcggttgcgtcgcttcacgaacttcgatttgatgtaagattttctacgataggagtattattgttaccggatctatgttttacattgcttcaggtgctttagagttgggaagcaggcaacggatggcttggtgtatattaatttggaagatctttgctttttacggagggttggtgaaggattagatacttggatgagaatttggacgaatggcgtgttctttccgtgttctaattcagccgtctgatctatggccgatgtgggattcacaggttgttatgcttatgaaaaggatgtgtaagatgtcanggcaaaagggccttaatattgatttggaaggggctggttctgatctatctt

SEQ ID NO: 2769 - DNA, 301 bp, Gossypium hirsutum
  Clone ID: LIB3493-008-P1-M1-E4
ggcttggaggagctgcagatcaacaggatgcaatcaagtgcaatggaagcaacatatagggcatgaaacataggaagatcagggtcaattgccaggaatgattacaggaaggaatcggactccttgagccaaacagaggtagtggaatacttaactcaagagctggcatgcattcgtaatccatgttgaatattgagtatctaaggcacgacagccattccaacttaataaatgctggaagcaagatcggagagactatcagagattgccctgccctgtcaagcctgcaaacggtgcaaga

SEQ ID NO: 2770 - DNA, 448 bp, Gossypium hirsutum
  Clone ID: LIB3493-008-P1-M1-E5
ggaggtgcaaagagttttctatggtgaaatggaggatgaggaggaggcggactgcttgcagtggcggaggcagcaccggtggtcgatcagttagaatgaagatcaaaaggttgcaaaagctaattccgggagggaaattgatgcaaccggatcgcctgttcttgaggacggcagattatatactgcatttgcgcttacaacttaatcttctgcaagctctttccaagatttgccaaccctcaatttaatctctccttttctttttataagggtaaaggtaaaagttatttaaagaatgaatgatgttaactaaacactccaataatcagtcgacattaatattcaaatattatgtagattatatataatatagaatttatatggcattggctgccttgccatataccaatgtactctcttccttcttcttcttcttctttttttctta

SEQ ID NO: 2771 - DNA, 349 bp, Gossypium hirsutum
  Clone ID: LIB3493-008-P1-M1-E6
tgacgtacgtggaggccggaagcaacttgacgaagccggacaagccttgctgtccggaattggctgggctagtggaaagtagccctcaatgcttgtgttatttgctggataagaacgcgacggcgaactatgggttcaacattgacatggatagagctcttaagcttcctgatgtttgccatgttaaaactcctcctgttagtctttgttcagctattgtcggagctccaatcggagttccaactcaaagcactgaaggatctatgtcaccagcatccgagccaacaggttccgtagcatacggaccgtcttcatccgccatggcaccaacaccggactgcatgacaaa

SEQ ID NO: 2772 - DNA, 88 bp, Gossypium hirsutum
  Clone ID: LIB3493-008-P1-M1-E7
ccttaaaaaaaaagtggaccttttttggttgggtcgaatctttttaacccatttccttttggatggaaaagccttttgggaggcctaa

SEQ ID NO: 2773 - DNA, 408 bp, Gossypium hirsutum
  Clone ID: LIB3493-008-P1-M1-E8
gcaagaaggaagcttggtcacccaaaatgaactttcaaaagattcttttcctcagaatgataagtcaatcaaagggcaagaaattgcaggttgtgtcactaatatacaatctcagcctccattgtcgaaagacttgaattcagatctaaagttagagccttctaaagcagagaagcaagggaaggttacaagtagtaaaggagcaccagcacctcgtaaacgaagttatgaccctgacttgtttttcaaagtgaatggaaagctgtatcaaaggcttgggaagataggcagtggaggaagcagcgaggtccacaaagtcatttcatcagattgtacaatatacgcgctcaagaaaatcaagctcaaaggtcgtgactatgctagtgcatatgggtttgtcaggaaatg

SEQ ID NO: 2774 - DNA, 344 bp, Gossypium hirsutum
  unsure (1)..(344): unsure at all n locations; Clone ID: LIB3493-008-P1-M1-E9
cggacgcgtgggttgcaagactgcgtttgaattgatctttgcttttgatgaagtcatttgtcttgggcacaaggaaaacgttacagttgcacaagttaagcaatactgtgagatggagagtcatgaagagaaattgcacaagctggtattgcagagcaagattaatgaaactaaggatgtcatgaagcgtaaagctagtgagattgataagagcaagattgataagaataaaggtgataaaggagggttcatgtcaatgggctctggaagaattgaaagtagctttagtgatatgagcatttctagcagtggaagtggcttttggaagtagntctgggttggga

SEQ ID NO: 2775 - DNA, 385 bp, Gossypium hirsutum
  Clone ID: LIB3493-008-P1-M1-F1
cggacgcgtgggctcaactaaccatcttctatgatggacacgtttgtgtgtttgatgcaattcctgtggaaaaggtgcgggagattatgcttattgctgcaactggtgctgctaactcttgtgacatgaagaaagttgcaactgattgtgccaccacctcacctgttcttacgaggtctccttcgcttcaaagtactgctactgcaactgctctggcttcaccacaggcacaagtgtatcctactaacaggacccctttctgcaaactgaaagaactaccaattgcaaggagacactcccttcagcgattttttgagaagcggcgggacaggctggtgaacaggaatccatatcctaatccatcaacaccaaaatcattcgatga

SEQ ID NO: 2776 - DNA, 351 bp, Gossypium hirsutum
  unsure (1)..(351): unsure at all n locations; Clone ID: LIB3493-008-P1-M1-F10
ctgcgatctataccctcaaagcttaaagcataacccaaatgggaggtttgttgttgtttgtggagatggcgagtacatcatatatacggctttggcgtggagaaataggtcatttggttctgcattggaatttgtttggtcatctgaaggcgagtatgctgttagagaaagctcatcaaagatcaaaattttcagcaaaaatttccaggaaaagaggagtgtccgtccaacattctccgctgagcgtatttttgggggtactttattggcgatgtgctccaatgattntatttgtttttatgattgggctgagtgcaggttgattcgtcgaattgatgttactgtgaaaaa

SEQ ID NO: 2777 - DNA, 480 bp, Gossypium hirsutum
  unsure (1)..(480): unsure at all n locations; Clone ID: LIB3493-008-P1-M1-F11
ttcggccgtcgaaaatgtcgaaacgagggcgtggaggatcagctggaaacaagttcaggatgtcgctgggtttaccagtggctgccaccgtgaactgtgcagataacaccggtgctaagaacctttatatcatttccgtgaagggaatcaagggccgcctcaaccgattgccatcggcttgtgttggagacatggtgatggctactgtcaagaaaggaaagcctgatctaaggaagaaggtcttgcctgccgtcattgtgaggcaacgtaagccttggcgccgaaaggacggtgtttacatgtactttgaagataatgctggtgtcattgtgaatccgaagggagaaatgaaaggttctgccattactggtccaatttggaaaggagtgtgctgatctgtggccaagaaattgaagtgcagcaaatgccattgtttaaagatttgaatttttctaagagattttgttncctgagtcatgg

SEQ ID NO: 2778 - DNA, 266 bp, Gossypium hirsutum
  Clone ID: LIB3493-008-P1-M1-F12
ttcaaaaaaaacatagaagaaattgcatatatatagccctcagcaaacaaggatgaaaacagtaatgggatcccagagatctccctcaacaagtattacaaatataacaagccaatgatgcaaaatcatagatagattcaacaaaatttggctcttatgttattagggacgtaacgtacttaaaagataagataccctctaagtgcatttagccatgtaggcttcccatccttgaagacggtactcacgagctgcctcagctgggt

SEQ ID NO: 2779 - DNA, 442 bp, Gossypium hirsutum
  unsure (1)..(442): unsure at all n locations; Clone ID: LIB3493-008-P1-M1-F2
cccacgcgtncgcgagatcaaagacgacaccgatcccacgaccgatgatgtcgtttttcgtgacatcggtttcggggccgacgatctggcaaacggattaacctggttacgaactcagttcctttcttctaggccatttcgtgcattctctcattggacacaacgatatattgatttcctcgatagcagattcaatacaaataatttcactcgcgaatcaagctcatggtggccatcatggttcattttatagcttcactgtctttaaatatatcaacagcctgcanactttggtaataatttcaacacattacaagggcaggatgtatatatatatatatagactttctattatatactaacaattaagactatcatgatggcaaaaaaattacttcaaggatatattggagcttttactggttcttaacagatgaagacc

SEQ ID NO: 2780 - DNA, 62 bp, Gossypium hirsutum
  unsure (1)..(62): unsure at all n locations; Clone ID: LIB3493-008-P1-M1-F3
cccacgcgtncgtgtgaagaaaaaaatggttgggctgtttaggttggtgagtgggtgtccgg

SEQ ID NO: 2781 - DNA, 377 bp, Gossypium hirsutum
  Clone ID: LIB3493-008-P1-M1-F4
gtgcttcaaggtcataggatcgagcacccacatggaaactggttgatgcctcccccaacatcatctaattacgagaatcctatccaatcaagagatttaatgccaaaagcttcattgggacaagatcatgagaacggaaaatctagagaaggaagttgcaagctctttggtattcctctcattagtaattctgttgcatcagagcccaccgtctctcctattaatgccacgaacaaggcagcaagtcatgtggaacctgcaccaaaccaaggtcatacatttacgtttgatcaaaagtccgagcagccaaaattctcaccgttggcagagaatctgtctatttttaatgagcaggagaaatcgtttcagctgggtca

SEQ ID NO: 2782 - DNA, 452 bp, Gossypium hirsutum
  Clone ID: LIB3493-008-P1-M1-F5
tgaaattagaaaagaagagatcagcttcaatggataagatcttgaggaagctgagaacggctcaggtgaaagctcaagaaatgaggagttccatatcaggcaaagaggatgaacagattcccaagacttcaccgaagtttacattcttccatatccgcatgagttttctcagcagttgcttcacctgccatggtttctagtttcttgcaaatcttatgtccatatcctcaaatcttttccatcaggtattaagcttccaagggagtatttgtttctggatttttttccctgccggtttctcggcttccctactcttccatgtaaattatcttaagatttctagattcaatggtccaggagaccgcagctttcaacttcttgttcttaggggattgtaattttttttggtcttttttaaaaggaaatgtcatcttttatgctttgcaatgtcc

SEQ ID NO: 2783 - DNA, 429 bp, Gossypium hirsutum
  unsure (1)..(429): unsure at all n locations; Clone ID: LIB3493-008-P1-M1-F6
tttttggcatatccttttaagtcgataacagctagttgcttctatgtttggaatatgctactttaaacttccacaagcttatgattaagggtatgtcttttgagttttgatttttcatttttttatcattcctagtgatgatatactgcagattctgttattacaatgccttcaaaggggatgatttgattgatagaaatctcattacttgttattattggtttcccactccaactaanagcactctctcaagtatatgcatatattatggattaccacatatatagtttttgctttcccacaagattgaaattaaaaaaaaaaaaattttcctttgaaaagttataaaaagaaagtttttttttaagtcttcctaaaaatcattgttatatggcctncttcattttcattgttagtgtttgcaccatc

SEQ ID NO: 2784 - DNA, 405 bp, Gossypium hirsutum
  unsure (1)..(405): unsure at all n locations; Clone ID: LIB3493-008-P1-M1-F7
gctnttncaaagttgtttggggacaagaatctggaaaatgatttgaatgtgcgctctagtgatgctacaaacttgtctgaacattctgaggatgtatttgaatgtagaaagggtgaagatatagaacaatatggaagaagaatatatgatcatgtatttggtcataacatagaagtggcattgtctaatgaagaaacttggaaaaaccgtaacagaccgcggcctatatatagtaaagatgtctttcctgacaaactaactaaagagaatggaaaaacagaaaaaggtagtgcaacagatgatgtctctgccatggcatctctgggcttgaagaatcctcaagatatatggagccttgccgagaatttcagagttttctacgagtctttgagattatttttcttg

SEQ ID NO: 2785 - DNA, 373 bp, Gossypium hirsutum
  unsure (1)..(373): unsure at all n locations; Clone ID: LIB3493-008-P1-M1-F8
ctgtcttctcccccaaaaaagtttcttttctctgattctttggagctctattcccatttttttcacattttcactttcaaagttctttcgtcagattctttgttcttcttccgccgatgaaaacagaagaacttatctgaaaatctggaattcaggagaagttgataagaggcgaagcattcgtgcacgaaacctatggtgcatacaagacccttgaagaactttgggatggtgaactttgagagttactcttaaaatgtggcattcagtaggttagagtgatgcatttgctcggctatattatagaaggatgctgccaccactgacctnctgtcatcaatgagcgttacatttcagcatgaaaaagagtaaa

SEQ ID NO: 2786 - DNA, 322 bp, Gossypium hirsutum
  Clone ID: LIB3493-008-P1-M1-F9
atcgtttagtaatctctttctcttttttttttcagcaaaggtgaagatcggtatcaacggattcggtaggatcggtaggttggtggctcgagttgctttacaaagagacgatgttgaactcgtcgctgttaacgatccttttatcactactgattacatgacatatatgttcaagtacgacagtgttcacgggcaatggaagcatcatgaactcaaagtcaaggattcgaagacccttctgtttggcgagaagccagtcactgttttcggtattaggaacccagaggagattccatggggcgagaccggagctgaatacatt

SEQ ID NO: 2787 - DNA, 367 bp, Gossypium hirsutum
  unsure (1)..(367): unsure at all n locations; Clone ID: LIB3493-008-P1-M1-G1
gaaaatagttatgtgacaactcgtgtgatgggaacttttggttatgttgctccagaatatgcttgtactggaatgctgaatgagaagagtgatgtgtatagctttggtatacttattatggagattatttccgggagaagccctgttgactatagccgtcctccaggagaggtgaatntggtgagtggttaaaaaccatggttggaaaccggaaatctgaggaagtagttgaccctaagttacccgagatgcctgcttcaaaagcacttaaacgtgtattgctggttgctcttaaatgcgttgatcctgatgcgacaaagaggccaaaaatggggcatattatccacatgcttgagggctgtgatct

SEQ ID NO: 2788 - DNA, 379 bp, Gossypium hirsutum
  Clone ID: LIB3493-008-P1-M1-G10
gtaaagctccacctctagagcataatactcctgatgatgaagatgtccttgaagaggaaaaccttgttagaacacaaacaagggaaggtaccgttgatccaaatgttgcagttcagacacgtggtcttgcaaagacatttcctgggaccagaacatgcggtttctgctgtaagtgcaagaagactgcaccataccatgctgttaagggcttatgggtgaaccttgcaaaggatcagttattttgtcttcttggacccaatggagctggaaaaaccacagcaatcaactgcttgactggcataacacctgtgactagtggagatgcgttgatctacggtaattcttggtcgagttctgttggtatgtaaacattcgaaga

SEQ ID NO: 2789 - DNA, 54 bp, Gossypium hirsutum
  Clone ID: LIB3493-008-P1-M1-G11
gggaccgtggaaggtccggattcttagcagcagataacctagttgtatacattc

SEQ ID NO: 2790 - DNA, 248 bp, Gossypium hirsutum
  Clone ID: LIB3493-008-P1-M1-G12
gaagagcagtactggcgcgaagccgagggtcctaaatctaaggccaccaagaaacgcgaggaagaagccgagaaacgagctgaagccgccgctcgcaaggctgaggcacgccgtcaagccgaaatggaggagaaagagatcgaaaaggcgttgaagaaaccggataagaaggccaaccgtgtggcgattccggtgccgaaggtgaccgaagcggagctacagaagaggaaggaggaggagcaagcgga

SEQ ID NO: 2791 - DNA, 128 bp, Gossypium hirsutum
  Clone ID: LIB3493-008-P1-M1-G2
gctttggctcccaccacttatccctcctatctctgctctaacacttgctcacccttacacagagccactcaacctctcctttcttcaaccagcatgtaggattagacttacagcagtgttcacgtttc

SEQ ID NO: 2792 - DNA, 318 bp, Gossypium hirsutum
  unsure (1)..(318): unsure at all n locations; Clone ID: LIB3493-008-P1-M1-G3
gagtattcttactctctagatgaggagggtattggcaagactgcntttgaactgatctttgcttttgatgaagtcatttgtcttgggcacaaggaaaatgtgactgtcacaccaggtaagcaatactgtgaaatggagagtcatgaagagaagtngcacaagctggtattgcagagcaagatttatgaaactaaggatgtcatgaagccgtaagctagtgagattgacaagagcaagattgatangaatagatctgacaaaggagggttcatgtcaatgggttctggaagaatagaaactagctttaatgaaatgagt

SEQ ID NO: 2793 - DNA, 420 bp, Gossypium hirsutum
  unsure (1)..(420): unsure at all n locations; Clone ID: LIB3493-008-P1-M1-G4
agcgtcttcaatcaagccatctgctgattttactcaaaaacttgctgaagtttatagtaagttgaaagaaaatggggagaaattcgaggtggttatgatatcgcttgatgatgatgaggaatccttcaggcaaagctttggggcaccatggttggcattgcctttgaaagacaagagctgtgagaaattggctaggtatttcgagctcttgacccttcccactgttgtcattatcgggccagatggaaaaactctccaccctaatgctgctgatgcgattgatgaacacgggattgtggcctaccccttcacccncgaaaaatttgcggagcttaaagaaatagagaaagcaagtgaggcagcacaaactctggaatcagttctggtttcagggggtttagatttgtcctanggaaggat

SEQ ID NO: 2794 - DNA, 291 bp, Gossypium hirsutum
  Clone ID: LIB3493-008-P1-M1-G7
caaggttgttgtactctggactgcaaacactgagaggtacagcaatgtcattgtggggctaaatgacaccgtggaaagccttatggcttctttggagaagaatgaatcagagatttctccttccactttgtatgctattgcttgtgttcttgaaaatgttcctttcatcaatggcagcccacaaaacacctttgttccagggttgattgatttggctattcaaaggaactgtctgattggaggagatgacttcaagagtggccagaccaagatgaaatctgtcctcgtgga

SEQ ID NO: 2795 - DNA, 218 bp, Gossypium hirsutum
  Clone ID: LIB3493-008-P1-M1-G8
ccacagagaagggtttctcaaggagaaccaaaagatgataatatcagacctcaggggcttttattcacacccgaaacattagacatttcagatacaggcacatcttttacattcaacatggattcatctttctctcaaagagtatcaatgaatgaaagcccggcagtgcattcactgcaacagagattaagttccaatgaagaacctgatagtcatat

SEQ ID NO: 2796 - DNA, 321 bp, Gossypium hirsutum
  Clone ID: LIB3493-008-P1-M1-G9
caataaatatactggctaatgtcctacagaaggtattcagtgcctcatccaatcctgcaatggagaatatgcagcacacctttctcgggtatttgagacttggaggggtcttttcatatggaatatcagcaatgctctttggtttatgccctcgtccattaagcatagcatttcatttcttttccattgcaatatatggcatcggccgattgttacttccatttccttctcccaaacgcttgtgggatggggctgaattcctttggttggcatcaagtattcttctcccctacatatactccgaaggaatcagacaaacat

SEQ ID NO: 2797 - DNA, 453 bp, Gossypium hirsutum
  Clone ID: LIB3493-008-P1-M1-H10
aaggctttgaagaagaaaagccattgtcagacatggttgatccgatgttattacaagaagtgcatgccaagaaagaagtgttggctgtttttcaggttgctcttgcatgcactgaagcggaccctgagattcgaccaaggatgaaaactgtttcagataatcttgagagaattggatcatgattaacaacatagatgattattgtccgagaagacaaacaacatggtcgatggtttaggaagttcaaagatttactggttttttgcaaaagggctctccctgtttctttttgccatggtaaagttttgcattgttgtcaaaaattcactatccgttccctttaaaagtcttcagaatttggcccaaattttcctcaatattcatcggtttcttgaagctttctggagaccatatgttttaaatttaaatgtctctcattatattcatatgact

SEQ ID NO: 2798 - DNA, 362 bp, Gossypium hirsutum
  Clone ID: LIB3493-008-P1-M1-H11
gccgctactctgccatccaactggtacatgaagcaaccttttttccagtgctcaaccattgttagctaaagctgctaaacactttgagatttgaggtgtatttgattacggatattagatatgtttaacattacaacaaccttctgcaaaaggataagcgtgaaggagctagttaccagcgctcctgtgtatggcacaatcacggatggatcttctggcttaagtttgatgcttaggcggtgggctagtaaaaaaactgctggatcaactaagaatggaagagattcaaaacccaagaatcttggggtgaagaagttggtggcgagagggtgattcctggaaacattatagttcgtcaacga

SEQ ID NO: 2799 - DNA, 299 bp, Gossypium hirsutum
  unsure (1)..(299): unsure at all n locations; Clone ID: LIB3493-008-P1-M1-H12
gcggaaaagaaaagaaagaaaaatacagaaaaagaagcatatatggcaagcgaggcggcggtggaagttaacgccatatcggcggcggcgccagaggcggaagcaacaacaggggcagagaagcaaccacataaactcgagagaaagtggaccttttggtttgataaccaatcaaggcctaaacaaggcgccgcttggggtacctctctacgcaaggtttacacanttgacaccgtagaagaattttggtggttgtatgatcaaatattcaagcccagcaagttgcccgggaatgctga

SEQ ID NO: 2800 - DNA, 178 bp, Gossypium hirsutum
  unsure (1)..(178): unsure at all n locations; Clone ID: LIB3493-008-P1-M1-H2
cgaggagtggtggaagaccggaaaggcatttgcaacactgtatttgtttaacgagccatggaganttggttggtattttagaagacaaatcccatgtaagttctgttctacattcatctgctgcanaagacaatcaataagctgtttgtctgttccatttgcttgacacaatatgagc

SEQ ID NO: 2801 - DNA, 153 bp, Gossypium hirsutum
  Clone ID: LIB3493-008-P1-M1-H3
ctcggcctgcgcctggcgcctggctatcattgctataccctcatgcgatgaaacagtgcagtgatcgctactgcgacacagtggttttcgacacactacgcatgtcaattaacgtgccacttttacgatgacagtagctaatttcaccaacac

SEQ ID NO: 2802 - DNA, 255 bp, Gossypium hirsutum
  Clone ID: LIB3493-008-P1-M1-H5
aaaaagctcaaccttccgagccacctaaacaagattacatccacgtacgagcgcgaaggggtcaagctactgatagccacagcttagctgaaagggctaggagagaaaagattagtgaaagaatgaagattcttcacgatttggttcctgggtgcaataaggttattggcaaagcacttgtccttgatgagataattaattacattcaatcactacagcgtcaggtcgagttcctatcaatgaagcttgagcagt

SEQ ID NO: 2803 - DNA, 162 bp, Gossypium hirsutum
  unsure (1)..(162): unsure at all n locations; Clone ID: LIB3493-008-P1-M1-H6
atctaactgcagctgcggtgacaactgctcatgcagcaggaaccttaaccttggatactcggagaagacaaccagcactcagaccatcatctncggagttgcgcccagtaagatgacctttgagggaccagagatgagcactactgaatcaggacatggatg

SEQ ID NO: 2804 - DNA, 280 bp, Gossypium hirsutum
  Clone ID: LIB3493-008-P1-M1-H7
cggacgcgtgggcggacgcgtgggttcgactacatgctccagggtataggtctgagatgcatgattcatttggatgcttaagagagtgttgctgctgtatatttgcccaaccaaggatcaaaactctaatgttttgtcctactatgtgttatatttatgtgcctacttaagctacctttcccggttatcaagagtgcccatatagaactctctcttctaaaaaaaaaaaaagagagttctttatatggagttttatattatgtgatgagagaataaatta

SEQ ID NO: 2805 - DNA, 247 bp, Gossypium hirsutum
  unsure (1)..(247): unsure at all n locations; Clone ID: LIB3493-008-P1-M1-H8
gnggaatcaaacaagatcgatcttttaatttcgatctatctttataaaacaaaaacccatttttctttgttcattaaaattttgtttctcaaagcctttgaaggaaaaaaaatgcgggctttgaggcttctattggtcttgggatttttaacagtcttgtcggtggcttcttgtgttgttatcccacttgaaagagcttttcctttgaatggtcgagttgagctgagccaactcgtagctcgtgatc

SEQ ID NO: 2806 - DNA, 290 bp, Gossypium hirsutum
  Clone ID: LIB3493-008-P1-M1-H9
ctcccgcaaaaccctcacgacaaaagaattctcttttctatttttcaccactctcctgcaaaaatgtttcgatccgttgctagatcggccgccggtaagaacctcctccgacgaggatatgcaaccgccgtacctgaacggaaagtcgctgtcttgggcgcagctggagggatcggccaacccttggctctcctcatgaagcttaaccctcttgtttctcaactggctctctatgatatcgctaacactcccggtgttgccgctgatgtcagccacatcaactctagatc

SEQ ID NO: 2807 - DNA, 392 bp, Gossypium hirsutum
  Clone ID: LIB3493-009-P1-M1-A1
ctatttctcaaatatcaaatccctcgaaaaatcctacccatccaatcaccacccgaaaccatggccactccttccccacgcgaagaaaatgtctacaaggccaaactcgccgagcaagccgagcgctacgaggagatggtcaagttcatggagaacgtcgtctccgccgtccccgctgccgacgaactctccgtcgaggaacgcaaccttctctctgtcgcctacaagaacgtcatcggcgcccgccgtgcttcctggaagatcgtcttctccatcgagcataaagaggaaggccgtggcaacgcccaccacgttgccgtcatccgtgactacagggcatagatcgaggccgagttgttcgagatttgcgctggaattttgaagctccttga

SEQ ID NO: 2808 - DNA, 309 bp, Gossypium hirsutum
  unsure (1)..(309): unsure at all n locations; Clone ID: LIB3493-009-P1-M1-A11
cttaaaaccctaaccctagaaatttattcggaattcatcgctggtgctatttgacctcattcaaaatgcctcgccgtagctctggaaggtctgcttctcgccctgcccctcgtcctgctcctgctcgcaaccctccacctcaaccagctcatcatgctcctcctccagctcctgctcagagtggaagtggtggatccttgctcggaggcataggctctaccatagctcanggcatggcatttggtactggaagtgctgtagctcacagggctgtggatgctgtgatgggtcctcgtactattcaacatg

SEQ ID NO: 2809 - DNA, 320 bp, Gossypium hirsutum
  unsure (1)..(320): unsure at all n locations; Clone ID: LIB3493-009-P1-M1-A12
acgctaataatcgctttttcaaaggaaacagcatatgggaatttatcattgctgatctactagcaaaaggaatgagaaatgctaaaaatgctattctttctggctgttccgctggaggattggcttcgatattgcactgtgacaggtttcgagctctccttcccgcttctactaaagtaaagtgcatttcagatgctggcttcttcctccatgcgcaagatgtctcgggagggaagcacatagaagaattctatggcaaagtggctagactacacggatccgttaagaatttgcncgcgtcttgcacttcaagaatggga

SEQ ID NO: 2810 - DNA, 284 bp, Gossypium hirsutum
  Clone ID: LIB3493-009-P1-M1-A2
tgatcagcaacgtttgatttataaaggccgagtcttgaaggacgaccaaacccttcaaagttatggtttgcaagctgatcataccgtccacatggttcgtagttttgccccatcttcatctatacctcctcctgcagctaccacaaatactgcaactcctaattctactccaggggtcacacggggtgttggttctaatgagggtgctggtctgggagcatcatctttccctggacttaatgcacttggtggcaatggaggtttgggtctgtttgggtctggac

SEQ ID NO: 2811 - DNA, 262 bp, Gossypium hirsutum
  Clone ID: LIB3493-009-P1-M1-A3
ccgggtccggagagacggagaacgccacaggacgcgaacctacaagggtggccttcgtggctaatagacgtcgttggggaagccatcaatgactggaccccgagacacgccagcaccttcgagaagcttgacaagattggacaaggaacttatagcaatgtgtacaaagccagggatctattaacagggaaaatagtggcattaaagaaggttaggtttgacaatttagacccacaaagtgtaaagtttatggctagagaga

SEQ ID NO: 2812 - DNA, 281 bp, Gossypium hirsutum
  Clone ID: LIB3493-009-P1-M1-A4
ctctcttctttcctcctagcccaaaaaaaaaaaaccctctttcctttctctcgttctttttaccgttcaatcatgtcttgcttcattagcaaatatgccgatgagttggctaaaaacgctgcttatattggaacccctggaaagggtatccttgctgctgatgaatccactggcaccatcggcaagcgtctttcaagcattaatgtagagaatgttgaagataacaggcgtgctctccgtgagctcctattcacaactccaggagctcttcagtacctcag

SEQ ID NO: 2813 - DNA, 143 bp, Gossypium hirsutum
  Clone ID: LIB3493-009-P1-M1-A5
aagtgattggtgcagctgagcctgctaggatatacaatgtcaatctctcgattttcacttcgatcccggatttttggagtattggtcaggtttttcctataatccccattcaccgattggatgaaaaagcccgagtgagggga

SEQ ID NO: 2814 - DNA, 202 bp, Gossypium hirsutum
  unsure (1)..(202): unsure at all n locations; Clone ID: LIB3493-009-P1-M1-A6
catattggattttaattataattgtctctgcatttcgtagctttctaaagacctcaattggtttgtatctttctacccctctntttgccttttataggacctttgcactgtttctagttatggctttacataatgatccacatgtatggcatgctcgccttggttacacctttgtttcaacaatgaagaaaatagttcaatt

SEQ ID NO: 2815 - DNA, 233 bp, Gossypium hirsutum
  Clone ID: LIB3493-009-P1-M1-A8
ggatggtggcggaaacaacctctaccctttccttcatctttcttctgatggtaacctcttcatcttcgccaaccgtgactccatccttttcaattatcaacgaaaccgtgtggtcaaaacctttccgaggattccagggggtggttccagaagctatccgagctcaggatcatcagttattctcccattggatcaccaagacaggttccaaaaagtcgaagtcatggtatgcg

SEQ ID NO: 2816 - DNA, 268 bp, Gossypium hirsutum
  Clone ID: LIB3493-009-P1-M1-A9
aagagcaggagggagttagttttggcttctgatctgcggagaaaaacggtgttgatggctgcggcggtgaccgggaggattgaacgtcggcgttaacgctgactgtatcggtcacaccggcgttaccaatgacgtggccatcttaagattccagccaaaaaaagaaaagttggcgctttctttttctaatactgaaaaccttcttaattatttatttcattctgatctgatctttgtttttggtttgtggtgttgattgaactgtggg

SEQ ID NO: 2817 - DNA, 428 bp, Gossypium hirsutum
  Clone ID: LIB3493-009-P1-M1-B1
atttctaatgacaacaacaacgacgagcaccatgaatcgagtcctcttttgagcaaacaagtggcagaccaagatttgaaggagaaaccaagtggtaaaaaggcaaaagaagctgccgccgaggtgccagctcatacggtagttgctaccggagatgggtttgggtggacagctgatgggttgccgttggtccaccggagtgtcgtcggagaacccttgggtcgatctcaatggagctcatctctccttgcttgtcttggccgtaacgatgaattttgcagcagcgacattgaagtttgtctccttggaagcttggtcccttgtgtgctatatggaaccaatgtcgaaagacttggatctgtcctgggacatttgtgaatcactgcttgccataactcggtctttacttaattggtaattcatttttt

SEQ ID NO: 2818 - DNA, 336 bp, Gossypium hirsutum
  Clone ID: LIB3493-009-P1-M1-B11
gccaaaagctggtcggagtcagctcacaggttcttgaagaactgcgctgatgccggaaatgttgaagcttgttacacgctcggcatgattcttttctactgcttagaaaatcgagggagtggagcctctcttatggctaaggcggcgattagctgccacgcgccagcgctttactccttagctgtgattcaattcaatggcagcggcggttccaaaaacgacaaggatcttagagccggtgtggccttgtgcgctcgtgctgcttttcttggccacatcgatgccctccgtgagctcggtcactgcctacaggacgggtacggcgttcgacaaaac

SEQ ID NO: 2819 - DNA, 273 bp, Gossypium hirsutum
  unsure (1)..(273): unsure at all n locations; Clone ID: LIB3493-009-P1-M1-B12
gtgaaatggaaacacgataatctctatctcggctacatctatgccatgctctactttgggggcaccaatttactgctcaacaaccgacctattcgcatcaagaagtggcctcatcttcctctcaggttccgccacgatggtactttcaagatcctccaggtcgccgatatgcatttcggctctggtcttctctcccgctgccgagacgcgctgccgtnccacttacattactgttcccagctcaacaccacacgatttctttaaaccatgatt

SEQ ID NO: 2820 - DNA, 205 bp, Gossypium hirsutum
  Clone ID: LIB3493-009-P1-M1-B2
atggaagggacgaaatgaaagtgtgatctgggatgcgacattatactacccactatacacaactgcaggtggcgcaccagaaaaccggcatggtctaggtacatatagactgtatcgtcgatcatctgcatcgatgaggagctttatacctgcgccagggcctatgactggcggtcgtctgatgaacctaaaggaaaagctgact

SEQ ID NO: 2821 - DNA, 440 bp, Gossypium hirsutum
  Clone ID: LIB3493-009-P1-M1-B3
cgtgctcgtcatcgatctcgaagcaactcacctcgtcgatctccaagttattcttcttattcaagaagtcagagtcggtctcctcgttattcatctggcaagggtaggagtagatcttactcccctcggcacaggtcgtactcccgttctccctccccttacagtggatcgtcagaagactgctactatagaagatgggaccgttcctactctcctgatgatcgatattacagaaggcgtgatagatcttacactcccaaggactgttactaccgcaggtggaaccgttcctactcacctgatgatggatactatagaaggccggggccgttcttatacacctgatgaacgatactatagaagggcggatcgttcctactcacctgacgatcgatactacagaaggccgggactgttcctaactaacctgatgatcgata

SEQ ID NO: 2822 - DNA, 156 bp, Gossypium hirsutum
  Clone ID: LIB3493-009-P1-M1-B4
acgggcagctacaaatcttatttctaggaaatggacacatcacattacgactgtgctgttctttggataaggcctgaggtctttatgggatggatttatctaggatgggcaggcatagagaattgtctgaagttgcaacaaaacagggtgcttact

SEQ ID NO: 2823 - DNA, 231 bp, Gossypium hirsutum
  Clone ID: LIB3493-009-P1-M1-B5
ccggcaatactgacaattgatgaatcgaatgcaacatgtgggaagagatgatctgctattggcttagacaatactgaacccaaccgccaggcttacagacagattgtgctcacaactcctggcctgggagaatatatatgcggtgccatgcttttagaggaaacactctaccagtcaactacagatgggaagaagtatgttgatgtcttgcacgaccagaaaatcgcacct

SEQ ID NO: 2824 - DNA, 427 bp, Gossypium hirsutum
  Clone ID: LIB3493-009-P1-M1-B6
cggacgcgtgggcggacgcgtggggtcttattcaacaaaacacaacgccactagagtttagtttgatcagcaaccctctgctcttcttcttccttaaacaagcaaaacaaaaaaaaaaaaattatgggtggcgaaggaaaggtctatactttggctgaggtttctcaacacaacaatgccaaagactgttggcttatcattgagggcaaggtatatgatgtgactaaattcttggaggatcatcctggtggtgatgaggtcctgttgtctgcaacagggaaagatgcatgtgatgattttgaggatgttggtcatagtagcagtgctcgggcaatgatggatgagttttatgtgggtgacgtcgatacatcaactatcccaactaagaccaagtacacccctcccaagcagacttactatgagcagg

SEQ ID NO: 2825 - DNA, 381 bp, Gossypium hirsutum
  Clone ID: LIB3493-009-P1-M1-B8
gaaaacaattataaattttgtttatttataagcacaaaagaaattcctcttctctatcttgaatacccagctttgggatcaaagttggcaaattgcagtgatgatggagaatcctagtttcactcttttacttgtctgtgtcttatgcatgtcctcagtggtacaatgcaaatacaactgccccgaaaagtacgatccccatgttatgcaagaacgataccaacgatgggtggcccgacacggccgaaagtacaagagcaagaacgaatggacattgcggttcgggatatacaaatccaattctcagttcattgatgtgtcaattcacagaacctatcattcaagttgaccgataacgaattcgcagacatgacaaatgat

SEQ ID NO: 2826 - DNA, 302 bp, Gossypium hirsutum
  Clone ID: LIB3493-009-P1-M1-B9
gaaacatccctgttggtggtggttcaaggaagaacaagagatcatcttcgtcatcctcttcttctattactacttctttaacatcatccaaaaagctacctggtttggttacaccacctagcttatcccagtgttctactcaaaaccctaagatccatgatggtcaagatctcaacctagctttccctacagctagtcaaggctctaggagtctctctgaattggttcaagttcccttagaaaaccaatatcagagccaaatacctagctcttcttcttgatcacctactacttcttaactt

SEQ ID NO: 2827 - DNA, 305 bp, Gossypium hirsutum
  Clone ID: LIB3493-009-P1-M1-C1
agatcactcgggcaacggcatcaagtgttcggagcccattgactctgatcttcggatccagcagcgtgagcttttagagtccattgtgcaactgcttccggtggagaaagctgcctttccgatccacttcttgtgttgccttctccgctgtgcaatttttctgaaagcctccagtgcttgcaggaacgaggcggagaaacggatctcgctcatattggagcatgttacggttgatgatcttttggtcctgtctttcacatatgatggggagaggctcttcgatctggacagcgtgaggaggatca

SEQ ID NO: 2828 - DNA, 383 bp, Gossypium hirsutum
  Clone ID: LIB3493-009-P1-M1-C10
caaaaatacagaactttgaatagttcatcttttttaatttctgggttttgggtttttagtctccgccatggattcaacttcaagtgcagcagcaccaacgccaccaccgctaccgccgagcttttacttcgacgacaaatggaagctatcaaagaaagaaactacatcatcatcatcatcgaagggacgttctttatcatcatcttcaacttcaaattcgtcatcattcatgatcaaaaccaccccgtcatcatcatcaacatcaccaccctcatcatcaaaaacaaaaagatgtgctttcactatgaaatgtgctaggctattcaaagaacaaaaggctcgtttttacatcattgaggcgttgtgttatcatgctcatttgc

SEQ ID NO: 2829 - DNA, 333 bp, Gossypium hirsutum
  Clone ID: LIB3493-009-P1-M1-C12
cagtatcgaggacagtgtcaagatcgcactcagccgagtcgagttcaacaccaaagctgccatgaggacccttggagacgacgttgaagacaatccggacggtgaggtcgacgacggagacggacttttgcaacacttgaaatcaacgtgcttgaaaatggaagctaaagagttctggagcttcgtgatcggaaaaaagaaagaaatcgatttgttaagagagaaaatccctgcagctttatcggaatgcatcgatccggcgaggtttgttatggaggccatatcgcaggtatttccggtggacaaaagagggaatgaggggaagagtgattt

SEQ ID NO: 2830 - DNA, 300 bp, Gossypium hirsutum
  Clone ID: LIB3493-009-P1-M1-C3
cgcttccatcagctcagattacaaacatgggccattcccaagtacggaatacagtaccgcttgaaatggcaaaaggaatccgtcaataacatgattgaggaagctgtattagaggctgaggaaaaaggtgctagtgtgttgagtctaggcctcatgaatcagggtgaagagctaaacaggtacggtgaggtgtatgtgaagaagcatcctcagttgaaagtgaagttagtggatgggagtagctttgcagttgcagttcttctaaatagcataccaaagggaacaacccaagtactcctt

SEQ ID NO: 2831 - DNA, 385 bp, Gossypium hirsutum
  unsure (1)..(385): unsure at all n locations; Clone ID: LIB3493-009-P1-M1-C5
gngaacgagtcgcactgagtgactgcgtggagcaaatagatgagtcgatggaggagttgagcaagacattaggggagttgaagcacttgagaggggagacgttcgagtttcagatgagtaatgcgcagacatgggtgagtgcggcgctgacgaatgaggacacgtgtcttgatgggttcgaaggagttgacggcaaggttaaatctaatgtgaagaggaagatcacgaatgtggctaaagttaccagtaatgctctgtacatgatcaataggctcaatgaaagtcgtggtaggcaccgttgaatctttgatgatgatgatgatgaattatgggnatgtgggatttatctagcttattatgggtcttaaaatatagtttttatttt

SEQ ID NO: 2832 - DNA, 344 bp, Gossypium hirsutum
  Clone ID: LIB3493-009-P1-M1-C6
cccacgcgtccgggatccaccttatctgaccatattttgagatttcacaacattccacaggtcaagatgatggttgtccttggagaacttggtggaagagatgagtattccttagttgaagccctgaaacagggaaaagtgaacaagccagtggttgcttgggtcagtggaacttgtgcacgcctcttcaaatcagaagtacagtttggtcatgctggagctaagagtggtggtgagatggagtctgcacagggaaagaatcaagcgctaagggaagctggagctgttgttcccacttcatatgaagctctggaagctacaatcaaggaaacatttgagaaact

SEQ ID NO: 2833 - DNA, 366 bp, Gossypium hirsutum
  Clone ID: LIB3493-009-P1-M1-C9
caggacccaactcattgtccctcatcaaagacattgtcgaagccgttgaaggaagttgccataagacttttcgtcccttaccagagtttcaagttttcctcaatgatcttccaacaaatgacttcaattcggtttttaagaccttgcctgatttctatagggaccttaaaaaagacaaaactgaaaggtgcccggctattttcatagcaagttaccctggttcattttatggcagactattcccaaacaattgcttgcacttcatctattcttcttacagtttgcattggctctccaaggttcccccatctctttacgatgagcatggcaagtctatcaacagaagggaacgtttacatatcggaa

SEQ ID NO: 2834 - DNA, 370 bp, Gossypium hirsutum
  Clone ID: LIB3493-009-P1-M1-D1
ttctggttatgatgagctcactgccaatctctcacatgtcctgccggtttccaagcagctagagtatttcagggaatataagatgcggctgaggcaactggttggagcgaggaaagcagaaaatattataaaaaatgcggtagctgtgatgagtatgggcacaaatgactttcttcaaaactactatttagaacccattcgccccaagcagtatactttggaagagtaccaaaattacttggcttcttgcatgtctgacgatgttaagacgatgcacagtcttgggataacaagattagtggtaagttgggtgcctccccctgggtgcatgccccttgtcaagactctaatgaaccaaggaaacatgtgt

SEQ ID NO: 2835 - DNA, 102 bp, Gossypium hirsutum
  unsure (1)..(102): unsure at all n locations; Clone ID: LIB3493-009-P1-M1-D10
aactntaacaacataaaatgggctgcattgggtgatcatatcactaattctcgaattcttttctacattcacaatagggcacatcggacannaatttttttt

SEQ ID NO: 2836 - DNA, 386 bp, Gossypium hirsutum
  Clone ID: LIB3493-009-P1-M1-D11
cccacgcgtccgctttctactgaccttggtggtcatcatccatccctcatacggacttaagcatttgaaaggtacagccctcgtcgacgaggtttgccgccacacatcccacagtgaatattgcgtcaataccatagtcccaaagccgccattatccggggaaaggatcgccagtaccactttgggttgggcacagataaaagctctggaagccggaaccatcatagctagtctacttaatgattcttcttccatcttaccagtagcaaagaaccctctacaggccaaagagcttctccaaatatgttgggattctaacatgaacaccatggaggacctttggattgctagcagtttgctttacaataagatcatcaatcccatga

SEQ ID NO: 2837 - DNA, 363 bp, Gossypium hirsutum
  unsure (1)..(363): unsure at all n locations; Clone ID: LIB3493-009-P1-M1-D12
ncnttagcacaccacgaagcttccatactgtatagccataactggatttgcttgtacttggtgtgccatatcgacaccgcatctgtcagctctaagagtatggttgggatgttcaacagttctcagttcgatatatattatcgnggcatgtgtgcttgcggctaaagacggagctaatgcaccaccccgagattatagcatacatggggaatcttctagcagagtttttacaactataggagcatctgcaaatcttgtgtttgcattcaatactggaatgttaccagaaatacaggcaacagtgaggcagcctgcagtgaagaacacgctgaaagctttgtactttcagttcaccaatcggag

SEQ ID NO: 2838 - DNA, 312 bp, Gossypium hirsutum
  Clone ID: LIB3493-009-P1-M1-D2
tttcgaatctgcggcggagataatgatgcacaaatttattccggtcaggaggttattttcggaaactaaatgttctctcccttgccaactacgacgacgttgcttctctcaggtggctcgaaatgagattgataacagggatggtcttgttcgtaaaatgcctccttttgattactctccgcctccttacaccggtcctttcgccgacgagatcctttccaaacgcaaggagtatcttagcccctccatgttttacttttacaccaaaccattgaacatagtggaggggaggatgcagtacttgttcgatga

SEQ ID NO: 2839 - DNA, 341 bp, Gossypium hirsutum
  Clone ID: LIB3493-009-P1-M1-D3
cggacgcgtggggttgatttgggaggtagtgaagaagaacaattgctttttggtgaggcagtttggaagaggaactgctagccttcagttcagcaaagagcccaacaatctctacaacctccactcctacaaacactctgggttggcaaacaagaaaacagtcaccattcaaagtgggggcaaagaccagtctgtgctgctagcaaccaccaagactaagaagcagaacaagccttcggccttgcttcacgagtcctttatgaaaaaggagttccccaggatggccaaggcggtcaaaaaccaggtgacagacaactactacaggccagatttaacaaaag

SEQ ID NO: 2840 - DNA, 327 bp, Gossypium hirsutum
  Clone ID: LIB3493-009-P1-M1-D4
atcccttcttgttgcttgaaggctagggcttcagcccctgagcttgaggctaaatgccattctaccgttgtttctgggtggttctcagaatctcagtcttcttctgataaggccggtaaaatggtttacttcaacaatcctatgtggcccggagaagcacattctctgaaagttgaaagcattttgtacaaagcaaggtcagactatcaagaggttcttgtttttgagtcatcaagctatgggaaagtgcttgttcttgatggtatagttcagctgactgagaaggatgaatgtgcatatcaggagatgataactcatcttcccctt

SEQ ID NO: 2841 - DNA, 346 bp, Gossypium hirsutum
  Clone ID: LIB3493-009-P1-M1-D5
cggacgcgtgggtggctctataataggttatgtagatggcaccttagacaaacctgcatatacatacttcaagttctgaatcattcatattgcaatcgggaacattgcgaacgtagcacttgttctgagtgcctctctatggtgagatacatgcaattcttttcgggacgctgaaacatgttgcaatcagggaactgcatacatttcatttggacagtgggttggtgcaatcattctctacacatatgtatttcatatgttagccccttccccggaaggtacttttgacaatgaagatgggaatgttccccttaagatccctcagaaggatggctcttcagagaat

SEQ ID NO: 2842 - DNA, 205 bp, Gossypium hirsutum
  Clone ID: LIB3493-009-P1-M1-D6
acgacgacgcgtgggtttgaatcgcgtgactgaatgatctaatggagtctacaggtgggaacatgaagtcaccacgtcgaagtccttattctacgaagctcctatcggttacagcattgaagacgttcgaccaaacggtggaatcaagacgttcagatctgcagcttactccaactgcgctcgcaagccatactgatatactcac

SEQ ID NO: 2843 - DNA, 345 bp, Gossypium hirsutum
  Clone ID: LIB3493-009-P1-M1-D7
cccacgcgtccggttctcttctacattcagcgaaggggtgctctgagatcacataccaaaatggtgaaggccgttgccgtccttagcagcaatgaaggtgttagcggaactgttttcttctcccaagaaggagatggtccaactaccgtgactgggaacctttctggtcttaagcccggactccatggcttccatgttcatgcccttggggacacaactaacgggtgcatgtcaactggaccccattttaatcctgctggcaaagagcatggtgctcccgaagatgagaaccgccatgctggtgatctaggaaatgtcacttgtggtgatgatggctgtgcaagc

SEQ ID NO: 2844 - DNA, 293 bp, Gossypium hirsutum
  Clone ID: LIB3493-009-P1-M1-D8
cggacgcgtgggtgattccagtgatacaagaaatatgggtttccagtttgcagggaaagctatatactctgcagtttgggttgctgctgtgtcattgttcatggagttgctgggtttctctacagagaagtggctgactgctggaggtctggggacggttttgctgactcttgctggtcgtgagatattcactaattttctttcaagtgcaatgattcatgcaactcgaccttttgttgtgaatgaatggattcaaacaaagattgagggatatgaagtttctggcactgttg

SEQ ID NO: 2845 - DNA, 351 bp, Gossypium hirsutum
  Clone ID: LIB3493-009-P1-M1-D9
aaaagactgtgtagccaagacattgaaaagactagaagagaagattcatgggcgagttttgaaccatttgctgtatctgatgcgcgtagcggagaagccagtccaaagacgagtggctttggctctagcttatctttgttcccctgatgaccagagaaccatattcattgataataatggacttgaactgcttcttgggcttcttggttctactagcactaagcagcaacttgatggtgctgtagctctgtacaagttgtccaacaaagctatgacgctttctcctatggatgcagctcccccttctccaacaccacaggtctatttgggggagcaatatgtgaacaacgc

SEQ ID NO: 2846 - DNA, 280 bp, Gossypium hirsutum
  Clone ID: LIB3493-009-P1-M1-E1
cccacgcgtccggaagaaggaggcatggagaagactgatgcatcatctgctgctgctgttgctgatgctaagatatcatcaatctttatctatcccgtaaaatcatgccgtggaatttcagttccacatgcacccctcactcctactgggtttcgatgggatcggcaatggcttgttgtgaatcagagagggagggcatatactcaaagggttgaaccaaagcttgctctagttgaggtgaacctgccagctgaggccttttcagagggctgggaaccta

SEQ ID NO: 2847 - DNA, 198 bp, Gossypium hirsutum
  Clone ID: LIB3493-009-P1-M1-E10
gggttaataacactcctgaacgtactcacggtcggactcatgatggtcgagctttggtcggagaacaatgcttgaagaccaatgattgtcaatgccatgttacctatggagatatgtcaagcaccataggaatcttgagttccgatacttcgagcttcgattccataaatggtcagaaaaccacattctccacgtcta

SEQ ID NO: 2848 - DNA, 261 bp, Gossypium hirsutum
  Clone ID: LIB3493-009-P1-M1-E11
cggacgcgtgggccgccgttctaaatcacagaaagctttgaagaagaagcttttggaggtgcaaaacatggggccgaagaaaggtggaaaggtggctgtgcccgccaagaagaaacaagagaaggttgtcaatccgttgtttgagaagcgtccaaagcagttcggcattggaggggctttacctcctaagaaggatttgcatcgattcgtgaagtggcctaaggttgttcgtattcaaaggaagaagaggatcctcaagca

SEQ ID NO: 2849 - DNA, 265 bp, Gossypium hirsutum
  Clone ID: LIB3493-009-P1-M1-E12
gatttttcttggttggcatatgtctcaaaggcctaacgttccccactattcttcaatagcttttggtctccattctcatctcctggtttccagtgagatgaaccctaattccaactggtcttaatagtttcatctctttctttttcttctattgattttttgttttaattccttttattgcctttctgaaaaaaagtaattgccttgttgatttgcaagcaaattttggtaaagttcttaaatatttgagtttagatcttctttg

SEQ ID NO: 2850 - DNA, 271 bp, Gossypium hirsutum
  Clone ID: LIB3493-009-P1-M1-E2
tgaaaattttcatctccctctgttgaatttcgccatttttgtgtctttcatcttttcttgttttgcatcctaaccctctcttcgtttctctctttctcagaccaatttttctgcaatttgattgaatacccgaatttatataggttttttcttcctcttttttgcccaaaagaaatcttcatctcggattcctagatctgttggaattcatttctgggaaatacccatatatttgatttacacaaaaagatatctattccatttggttttt

SEQ ID NO: 2851 - DNA, 312 bp, Gossypium hirsutum
  Clone ID: LIB3493-009-P1-M1-E3
ggaagattggactttttggtggtgctggtgtagggaagacagtgcttattatggaacttatcaacaatgttgctaaagctcacggtggtttctcagtgtttgccggtgttggagaacgtactagagagggtaatgacttgtatagggaaatgattgagagtggtgttattaagctaggtgaaaagcaggctgatagcaagtgcgctcttgtttatggtcaaatgaatgagccccctggtgctcgtgctcgtgttggccttactggtctgactgttgctgaaacattccgtgatgcaaaaaggcaggatgtgc

SEQ ID NO: 2852 - DNA, 80 bp, Gossypium hirsutum
  Clone ID: LIB3493-009-P1-M1-E5
tgttaataacggtgctgaagtttttgacccttcggataggaggaaggatcaggatgaaataagtcgtgacccaaaataca

SEQ ID NO: 2853 - DNA, 352 bp, Gossypium hirsutum
  Clone ID: LIB3493-009-P1-M1-E6
ctgagttaaaatcgctaaagcgatatggctttgcagctatgggaaacgttgaaggaggcgacaacggcgtatacgggtctatctccggccactttttttacggttctagctctgttatgggctgtttactatgtagcaaagggtctatttgggtcatccgatgatcatatccatcaacggtctacggctttcgaggagcagatggagccgctaccgccaccggttcagctcggcgagattaccgaggaggaacttaagcagtatgatgggtcggattcaaagaaatcactccttatggccatcaagggccagatctatgatgtttctcaaagcagaatgttttatggacctg

SEQ ID NO: 2854 - DNA, 309 bp, Gossypium hirsutum
  Clone ID: LIB3493-009-P1-M1-E7
cggacgcgtgggcagattttgatgtttgctgcatcaaacatttctgagaagtatttaccatcattccaagaagcagcgaaatctttcaagggaaagcttatctttgtttatgtgcaagtggataatgaagattttggaagacctgttgcagattattttggtgtcagtggagacggtcccaaactccttgcatacactggaaatgacgatgctaggaagtttgtctttgatggagaagtgacgttggataaaattaaggcttttggggaagattttttagaagacaggcttaaacctttctacaagtcg

SEQ ID NO: 2855 - DNA, 327 bp, Gossypium hirsutum
  Clone ID: LIB3493-009-P1-M1-E8
cctataccctcagtttccccaaatcaaaccctaagttgctttcctccatatttcactgattcaaggcctgagcttgatgtttcttctcaaacaaatcttcctttctttttttttaactctctttctctctcaagtcctcgattccacttcactctccagatctccccaagtaagttaggaagagttgggttagtgacaaatctgatgagccttcactgtgctgctgaacaatctgcttgttgtctagggcaatatacatcctgattcaaggctaggcatagaaaaccctttggagtgcctattttctagcagtttggcatcatatta

SEQ ID NO: 2856 - DNA, 230 bp, Gossypium hirsutum
  Clone ID: LIB3493-009-P1-M1-E9
caaaaacatcatccctttcgtgataatgaagacagtcttcactattttctcggtacttgtatccaccgtaatctccaccgtcaacggctgccctccgtcggaccgcgctgcgctgctagcattcaaagcagctctccacgagccttacttgggcatcttcaactcatggacgggcaccgactgttgccgcaactggtacggcgttagctgcgacccacagtcacatcgag

SEQ ID NO: 2857 - DNA, 307 bp, Gossypium hirsutum
  Clone ID: LIB3493-009-P1-M1-F1
gttcacatggagggtggaggatggtgtgaagatgtgccgacttgcctgtgtatgacgaacaccgatttatggtcatcaaagcaaacggtgaagcaatttggcttatctggactcttgagcgggcagcaaaaatccaatccagatttctacaattggaaccggattaaggttaggtactgctatggatcatcgttcaccgaggatgctgttgatcgagctgataatctctttatcaaaggaaacagcatatgggaatttatcattgctgatctactagcaacaggaatgagaaatgctaaaaatgcta

SEQ ID NO: 2858 - DNA, 319 bp, Gossypium hirsutum
  Clone ID: LIB3493-009-P1-M1-F10
gtctctcctttttcctctctaatggctgcagttcctctcagaaatttcgacgattttttagtgaggaggagatcatcgaatttgagattgaatctttcctgcaagtttccacttagatccattagaatggaaatcagtgataattgtacccctttgagtgcaaacaatgaatctagaggcacgttggttgttttcgaagggttggatcgtagtgggaaaacttcacaatgcgggagagtggtttcgtatttggagggaatgggtcattcagttgaaatatggcgatttccagacagaactactagtgtcggacagatga

SEQ ID NO: 2859 - DNA, 291 bp, Gossypium hirsutum
  Clone ID: LIB3493-009-P1-M1-F11
aaaatataaacttacgacatctacaaatggtgacctcggtgctacctagagtagaaagcttggcaagcagtgggattcaatcaatcccgaaagaatatatcaggcctcaagaagagcttacaagcataggtaacgtgtttgaagaagagaaaaaagaggaagggcctcaggttccgaccatcgatttgacagaaatcgagtcggaggacaaagaggtccgggaaagatgtcagcaggagctgaaaaaggctgccatggaaatgggtgtgatgcaccttgttaaccatggca

SEQ ID NO: 2860 - DNA, 318 bp, Gossypium hirsutum
  Clone ID: LIB3493-009-P1-M1-F12
gggagatgtttcactataggcagggtgtctcaagggaaggtcttggcctatacatcagtcagaagcttgtaaagattatgaatggtactgtacaatatctaagagaggctgaaaggtcatccttcattatctttttagaatttccattggctcgccagcttggccaccattgaaaacccatagccaagtgaagcttataagcatcgaaacaaggctactgcagcttccatatgaaccgtatcagtagcttgtcatctcaagcaaacaagcaccttaacaccttcggggtgatcataccgagtctggatgataccgggg

SEQ ID NO: 2861 - DNA, 380 bp, Gossypium hirsutum
  unsure (1)..(380): unsure at all n locations; Clone ID: LIB3493-009-P1-M1-F2
aatcccctaaaaaccaacccatttatttcactacccaacaacccaaaagataaaggaatcgtttacttgttcgtagcaatttatcgtcatttcaagctcaattctctgaaaatttttgtgctgaactccttttttctgtttgtactaccatgtgtggaggtgctattatctccgatttcataaccgccgncgcggtcgcgacgattgacggccgatttcttgtggcccgatctgaaaaaatccgggttgaaagaagggtcgggtaagagatactcgaaaccccgtgatcgactttgggcgatgatttcgagactgactttcaggagttcaaagatggagaatctgatatagatgattattatggtggatgatgtttggct

SEQ ID NO: 2862 - DNA, 284 bp, Gossypium hirsutum
  Clone ID: LIB3493-009-P1-M1-F3
aagcgatggcaatggctgctctcagacgcgaagggaggcgtttcgcccctctgatctctccccgtccaattactgctgtccgatcctctcctatcgttcccactcacgaatatgagggtccgattggtgttcgtcatatttcaactcaagtcgttagaaaccggatgaagagtgttaagaatattcagaaaattacaaaggctatgaagatggttgctgcctcaaagttgagagcagttcaaactaaagctgagaattcccgaggcctctggcagccatttact

SEQ ID NO: 2863 - DNA, 393 bp, Gossypium hirsutum
  Clone ID: LIB3493-009-P1-M1-F5
ttgagaaggccggtatcaatgttatccaaattgacgaggctgctttgagagaggggttgcctcttagaaagtcggagcacgccttctacttgaaatgggctgtccactccttcagaatcaccaactgtggtgtacaggacactacccagatccacactcatatgtgctactccaacttcaatgacatcatccactcaattatcgacatggatgctgatgtgataaccatcgagaactcacgtgcagatgaaaagctcctttcagtattccgtgaaggagtgaagtatggtgctggaatcggccctgggtctatgacatccactctcccagaataccattaaccgaagagattgctgaccgaatttacaagatgcttgctgtgcttgagacaaa

SEQ ID NO: 2864 - DNA, 380 bp, Gossypium hirsutum
  Clone ID: LIB3493-009-P1-M1-F6
cagcaagccgccaacttacgctcctccgcccaggccaccgaccaagccaccaacttacgcccctccacccaagccaccagtttatcctccaactaagccgccaactgcgcccccgactaagccaccagtgcatccaccgacatatcctccaccatcgccttctccagctaagccgcctacttatcctaaaccacaaaggagcctagtggctgttcagggcgttgttttttgcaagtcatgcaaatacgctggatccaacaccctgttgggagcaaaacctattttgggcgccactgtaaagctgacatgcaagaacaccaaatacaagcaagaggccactgcgaaaactgacaagaatggctatttcttcctgcaagcac

SEQ ID NO: 2865 - DNA, 372 bp, Gossypium hirsutum
  Clone ID: LIB3493-009-P1-M1-F8
gctcatttcatcgcgcagccactaaccttcatcggtttgatggccaatggcgcggataatggccggatcttaccaacggagccgcgattctggaaatctggtaaccttgctccctttttctctttttttttgtttaaaaaaaatgtgaatcttctgctattctttcaaaaaaaacgaaataaatttcaaagatttaaacaaaattttaataccgctcgatcctcgcccacatctatgcatatctgagatgtttgggctatcatcggcatcgaaggttccccttcatgtatttgtaccaaatttgcaagccaatcaaaggaaataaataataaatctggaaaatcacctttcaaactttttggcgtgattttt

SEQ ID NO: 2866 - DNA, 366 bp, Gossypium hirsutum
  Clone ID: LIB3493-009-P1-M1-F9
tggttggcccctcaaaactaatttgggcaggagaaaggttctgagatagcaaaacaattaccacccatggcaacggtctctgattcaccagaagatagtccaaaccctaatccaccaccatcgccgcccagcgatttcccttctaaaagcgaatcgaatgctcccgaacaagtcactccatggatcgattccgctgtggagcaagctcttctataccagaagatcatcgaacagaacgttaacgacgctatcaaagcttctagatctcgactttcagaaattcgctccacctcctcagctcattttaatctaaccattgagtcacttaaagatgtcaaatcacaacttgatgtctacgaggatttg

SEQ ID NO: 2867 - DNA, 249 bp, Gossypium hirsutum
  Clone ID: LIB3493-009-P1-M1-G1
gaagtgccccgtcgtggtcgccaagtcatggaagagccaactagcttcttcttcttcttcttcttcttcttcttctgattctcagcctctcgccaaggttgtcttctccctcgaccctctcaaacccgacgacccttctttacaccagtttactatggaggtggctggattagagaccgaaagaatacccaaaagctactctttgaacatgttcaaagactttgttcctatgtgtgtcttctctgaatc

SEQ ID NO: 2868 - DNA, 312 bp, Gossypium hirsutum
  Clone ID: LIB3493-009-P1-M1-G10
attatgtcaaatctaaatttggaaaacttgatctcttggttaataatgctggaacttttggagctattctacatcaacaagcttttgtcaaagctactgaacttgctggatactttccaagtgaagagcaagccagtgagtatgagattgcaactcaaacttttgagttggcgcaagaatgcttagaaaccaactactatggtgcaaaaagaatggttgaagcatttgttcccctgcttcacttatctgattcccccaggattgtcaatgtttcctccattatggggttattgaagaatatacccagtcaat

SEQ ID NO: 2869 - DNA, 346 bp, Gossypium hirsutum
  unsure (1)..(346): unsure at all n locations; Clone ID: LIB3493-009-P1-M1-G11
cttcttcttcggccttcggttttcatttttcaaagctacaaactgcaaatcctcaataatcttccctcggacaagcacaggtacgctataatttcgactgcccattaggtcgtaacctaaatttccttactgggttttcgttttcaagatggggactggagatgaagtagtggaaatcgagagcttagagagaagtttgttaccggaatccgttaccggagaacaggagtncgaggcagtcgatgagccagttctttacgcggcgtcgtttggagagatggnagaagaattcgtaaataccaaacggctcaatgggtttatactcggtggtttagtttagcttggg

SEQ ID NO: 2870 - DNA, 201 bp, Gossypium hirsutum
  Clone ID: LIB3493-009-P1-M1-G12
cggacgcgtgggcttttttccataaacacccaaagtaaaacgagtggagactttgagatatcttttaggtccccccaaaaaagggtttgtaagagaaatggctactttcccagttatcaacttagagaagcttaatggtgatgagagatcaagaatcatggagcaaatcaaggatgcctgtgaaaactggggcttttttga

SEQ ID NO: 2871 - DNA, 328 bp, Gossypium hirsutum
  Clone ID: LIB3493-009-P1-M1-G2
agattctggcctctcagatggtgcatccatgcatgttgatttggttggaggatactatgatgctggagacaatgtgaagttcggattccctatggccttcaccaccaccatgctttcttggagtgtgattgaatttggtgggctgatgaaaggagagttacaaaatgccaaacaagccatccgttgggctactgattacttgctcaaagcaaccgcacattcagacaccatctatgttcaggttggtgatgcaaagcaggaccattcttgcttggaaagaccagaagacatggacacctcccagagtgttttcaaaatagacaaaaac

SEQ ID NO: 2872 - DNA, 315 bp, Gossypium hirsutum
  Clone ID: LIB3493-009-P1-M1-G3
tgatgccagagtcagacgtgggagtctcggtatccattgacactgcagctgaaaagatgactccaccatcctcttcatcatcatcatcattggtgaagaatccctatgtgtcatcggatgtttctggtagcgaccttgtcagtggagtcattccctccatcacacctagatgaatgaagatggaagctattttgttgtgaaatttggaccatcgacagctactttgttggttcctgatatgaagcatgatatgtagataagtcacatgtttagattgtctttttgttagatagcttatttacgttatatgctctt

SEQ ID NO: 2873 - DNA, 375 bp, Gossypium hirsutum
  Clone ID: LIB3493-009-P1-M1-G4
cttaaaatataaaaaccttttcccttcactgctcaaaatcctattcaatctcccatggcttccaatctttctgagagtcagagttttggattgacatctatagctgaggaagaagctcgttggtgctgtgtccttgtgttggtaaccctgttattgctcaactctttcaaggaaactaactataccataacaaaggatgaggattatgatgggaaaggggtgagtcgtcgggtgttggagcgagcgtgtgatgaaatctatgtggttgcagaaggagaaaccctccactccattagcgacaagtggtgggatccttttatagtggagcacaacccccatattcatgacccttgatgatgtatttccccggacttc

SEQ ID NO: 2874 - DNA, 371 bp, Gossypium hirsutum
  Clone ID: LIB3493-009-P1-M1-G5
gggcagatgggccaaatgggtggtcagatgggtcacatggcttcaaggggtggtcagatgggttataacatgggccaaatgggaaaccatccgatgaaccagatgagtaattttgctgcagggcacggactaccagcagcaatgaataatggtggtgggtattagtaaaggatggcaccaggtactccttataatcaggctcaatatatggcagccatgatgatgaaccaacaacgggcaaaatggagggatgtatcctcccacgttgtatgctcatcaaccatatccacaaccaaatgatggacctacacccatgcattcacccgcatctgaatcgtatgctcattacttcagtgaagaaaacgcaaaca

SEQ ID NO: 2875 - DNA, 332 bp, Gossypium hirsutum
  Clone ID: LIB3493-009-P1-M1-G6
tcactactataggggagctcgtgcgcctgcggtccgatcgcggtcgcccacgtccctgcctgacggccacttgttaatttgcaccatattgacaaacgagttgagccgctgataatcggccaaattgaagtcatgatatgtttttaatttagcaaataaagtagtaattttgtaagtatcagctttagcaccagttcgagtgtgtcaatggctctggccatagcatctgatcgactttcaggggttcatagccattgctatctctgcattttaactctattgtcaggaaaaatatagatttcaactctgtgactatcgacaactacctagca

SEQ ID NO: 2876 - DNA, 300 bp, Gossypium hirsutum
  Clone ID: LIB3493-009-P1-M1-G7
cgaaaccctattttcctgtctgtaatctttgtttcgctcctcgcaatcgcctccgctaaagtattcttcgaagaacgttttgatgagggatgggaaagtcggtgggtaaaatctgactggaaaaaggatgagaacatggctggggagtggaattacacttctggaaaatggaatggagatcctaatgacaaaggtattcaaactagtgaagactacaggttctatgctatttcagctgagttcccagaagtcaacaacaaagataagactctagtcttccaattttctgtcaagcatgag

SEQ ID NO: 2877 - DNA, 275 bp, Gossypium hirsutum
  Clone ID: LIB3493-009-P1-M1-G8
cggacgcgtgggcagcgggctagatctatgcccgtttcgagatttgtttcttcttgggtccactttaagcgcatggacgctatggaaaagggacctaatgtgaaagccgattataactcggatagcccagatgacgaaaacggtgaagacgaagaagatgggcaagaccaagagttttacgacgatgggtataaaaacggcagcctaaatacgagaagtgtacaaaagttgtacagaaatgggattggaaacaacggtggaagtgtcagcggtga

SEQ ID NO: 2878 - DNA, 234 bp, Gossypium hirsutum
  unsure (1)..(234): unsure at all n locations; Clone ID: LIB3493-009-P1-M1-G9
ggctgtttgtaaattgatatgtagcttgttctttatgtttctcttgtctttgttagatgagaaatcggctttgacaacagacaccaaaggtatgaaatcagaaacatccaccattgacagcaaaacttcgaaaccagaagcttcccaaccagctcaggctggagcctccccttccaatatgggacctgngtttgtcccacccaatccgtttgatttctcagccatgagtggcct

SEQ ID NO: 2879 - DNA, 331 bp, Gossypium hirsutum
  Clone ID: LIB3493-009-P1-M1-H1
ctttttctttctaattttaattttagtttgtttcctctcttttactcaggccattagatttccggaaagaaatggaacccaaagcctcgatgaaaaacaatcaaactctcgatgacatcatgaaacaatcctcttcctcaaactccgactcactgtctcacctcgactcgccccactcacctctccgatcagaccacggtgactccgtcccacccgatccccaaaatacctcctctcctcatgttcctccggcagtctcccccccagttgacaactgcaaggcactcgtcgccttcgacaagtccacccagttcaacgccaattcttcccc

SEQ ID NO: 2880 - DNA, 338 bp, Gossypium hirsutum
  Clone ID: LIB3493-009-P1-M1-H10
gaggtgtcgaggctacgacctcacgcgtagcggtataagcaaaagtaccttccgaaatggtatttacaacaccgatgctgtttaccagaaaaataacagccacaacattgggaacctgtctgccaacaaatatagtggcaacaaccattgcaacaaagatattaataataacagcaacaccaacttcaacttcaacaacaacgagaacagcaacgcaaacaatgctgccgataaaaggttcaagactttgcctgccgccgagacacttccgagaaatgaggtgcttggtggatacatctttgtttgcaacaatgacacaatgcaagaagatcttaagc

SEQ ID NO: 2881 - DNA, 299 bp, Gossypium hirsutum
  Clone ID: LIB3493-009-P1-M1-H11
tagacccacgcgtgcgcgtgccttgttcgcgagcgtaatgcaatgcttcctaccatttcttccaaggattggttagacatcgactatgggattgcagaaggagctgattgtatcgcaatatcccttgtcaaatctgctgaagtgattaaacatctcaaaagctatattgctgctaggtcacgtggtagtgacatagcttttattgcaaagattgagagtattgactcattaaagaaacttggaagaaattattcaagcatcagatggagctatggttgcaagaggagacttgggtgctc

SEQ ID NO: 2882 - DNA, 133 bp, Gossypium hirsutum
  Clone ID: LIB3493-009-P1-M1-H12
acggctgtgtatgcagaatgggggtttgcaaggattaaaggtatgggttggggatgggctggtgtaatctggctatacagcgtggtgacttttataccactggattttatcaaatttgcaatccgctatgttc

SEQ ID NO: 2883 - DNA, 297 bp, Gossypium hirsutum
  unsure (1)..(297): unsure at all n locations; Clone ID: LIB3493-009-P1-M1-H2
aattggtctgtcgcttcctctactgctgcatctgtacgaactgctagatcgagggtaactattgggactgctccaacttttagaagtgctgaacgagctgagaaacggagggagtttcaccaaaagttggaggaaaaacaccaagctctggaggccgagagaagccagtatgaggccaggctcagggaagagcaagaggcggccattaagcagcttcgaaagggcctgttgtcaaagcaaacccggtacctagttctactanaaggacctcaccaaaggtgactgaaaactgcatga

SEQ ID NO: 2884 - DNA, 278 bp, Gossypium hirsutum
  Clone ID: LIB3493-009-P1-M1-H3
cccacgcgttcggataatcgtaagaaccttcctgctctgaaagaggaaattccttgggcgttgaaagctgcagcaagtccagctcgcttggtcctggaatcgttggaaggattttacccttcagaagttgatggaaagaaagatgcaaacctattggggcttatgcgaacttgtattatgttgatggaatgtcttagtgtcttgctttctaatctggatatgggttctgttttggctttgatctctgaagatattaaggaacaaagcaagcttattgc

SEQ ID NO: 2885 - DNA, 397 bp, Gossypium hirsutum
  Clone ID: LIB3493-009-P1-M1-H4
agaagatatgggaactggtagtgtgtgacagttcgctttcacttcaatataccaagtactttcccaacaatgttatcaatagtgttactttaaaagatgctatggaaaccataagtgaggatttaggtgtccctttgccagaaaaagtccgcttcttcaggtcacaaatgcaaaccataattacaaagtcatgtaaagagcttggcataaagcctgttcctagtaaacggtgtctgtcactgcttctttggttagaaaacgttatgagactatatacatgcgccatcctggttttcaaaaaggttccaagccacttttggcattagataaccctttcccaatggaacttccagagaacttatttggagaaaaatgggcatttgtccaagtacctttt

SEQ ID NO: 2886 - DNA, 373 bp, Gossypium hirsutum
  Clone ID: LIB3493-009-P1-M1-H5
acggttgagtagtaatttgcagcaatggagctgttctacttcatggtgttcggggcattgtcagcggtggtggcagcattagagctaagcaagaacagcaaggatcgaatcaacacatccccggctttcaattccttcaagaacaattaccttgttgtttactctctcatgatggctggagactggctgcagggtccatatgtttactatctttacagtacatatggctttggaaaaggggacattggacagctttttattgctggttttggatcctccatgttgtttgggacaattgttggatctctagctgacaaacaaggccggaagagagcatgtattacttactgcataacttacatacttagctgca

SEQ ID NO: 2887 - DNA, 388 bp, Gossypium hirsutum
  Clone ID: LIB3493-009-P1-M1-H6
cccacgcgtccggagaattctacagaaagtgaaaaagaaagcgtttttttttctctgtaatttatgcaaacgggaaatctgccacaatctctctcgatgaattcgccttttggaggaccgagcgcgtcgaatccaactgctgccggagctccggcgaataaggatcggaaaatggcaacggctgagcatttagttctcgatctcagcaaccctgatctccgagaaaacgctcttctggaactatcgaagaagagagaattatttcaagatttggctccattgttggggaattcttttggtactattgctgcacttttacaggagatagtttcaatttatcctggtctttcaccaccaaatctgactccagctcaatcaaatcgagttt

SEQ ID NO: 2888 - DNA, 282 bp, Gossypium hirsutum
  Clone ID: LIB3493-009-P1-M1-H7
cggacgcgtgggcggacgcgtgggggcgatgctagcttgtttgcgttggagaagttgtgccctcaactgcagcatgtagagttgtgtgggcttcatggaataacagatgctggggttctcctgttgctcgagagttgtgaggctttttattaaaggttaatctcagcggttgtgtgaatttgagcgacaaagttgttcaaacgatctccaacttgcatgggtggactctagaactgctgaatctcgatggttgcaagatcagcgacgctagtttagttgcaa

SEQ ID NO: 2889 - DNA, 334 bp, Gossypium hirsutum
  Clone ID: LIB3493-009-P1-M1-H8
aatttccttatctttactcccactttatcatcatcactgtctctttagcctttaccctttgtttcgttgatttgtttctaaggatttaatctccaaaccttcttcccatttcttcattacattgttcaagaaaaaagaagcaaaaaagcatggccaaagttctgttgttcattgcactatgtgtgcttccagctttggttagtgctacacgcattctgaataatcaattggtggtagaaggctatgtgtactgtgatacttgccgtgctggttttgaaacccctaagactagaagcctagctgatgccatggttaggttggtatgctccgacag

SEQ ID NO: 2890 - DNA, 298 bp, Gossypium hirsutum
  unsure (1)..(298): unsure at all n locations; Clone ID: LIB3493-009-P1-M1-H9
gggattacgaatgtaccagcaagcactagctggaattagtcacatttcttttgctgaggaagagactatttctcctaagaagccaactactcttcccgaggtggcaaagcagcgtgagttaagtggaacgctagaaagcgaagattcaaagttgaagaagcagctctcagatgcaaagtgcaaggagcttagcggacacaacatctttgcacccccacctgaaattttgccgaggccaacaaccgtacgtgcattggcattgaaggacagtttcgactngggagaatctcatacacat

SEQ ID NO: 2891 - DNA, 364 bp, Gossypium hirsutum
  unsure (1)..(364): unsure at all n locations; Clone ID: LIB3493-010-P1-M1-A1
gtaaagcagctgatttatacgtttcctgaagatgctgcaaccagtactggggctccgttctggtctgccccaaaaagattccctcagccacttcagttttcagtagctgatccaagtcatctgcaatttgttatggctgcttctatcctgagggctgaaacatttggcattcctattcctgattggattgagcatccgaagatgttggctgaggctattgagaaactaatagtcccagactttgagccgaagaaagatgtaaaaattgtaacggatgagaaggctactacactctcntgtgcatctatagatgatgcagcaggtatcgatgaactcatcttcaagtagagctttgcacgaaaaa

SEQ ID NO: 2892 - DNA, 357 bp, Gossypium hirsutum
  Clone ID: LIB3493-010-P1-M1-A10
gtttattcaagactgtgacggttcgatgtggccactgcaccaatcttttgccagtgaacatgcgtgggttgcttatgccctcggctaatcagtttcatttgcctcacaatttttttcactccttcccataatcttctggaagagatctcaaatccttctcccaacattttgctgaatcaaggcaacaccagtgacatcaccttacccactcgtggagtagttgatgagcttccaaggcctcctgttatcaacagacctccggagaaacgacagagagtcccctcagcgtacaaccgattcatcaaggacgagatccaacgcatcaaggcaggaaaccctgatataactcacaagaga

SEQ ID NO: 2893 - DNA, 289 bp, Gossypium hirsutum
  Clone ID: LIB3493-010-P1-M1-A11
cccacgcgtccgtgtactgttaatttggtgagggatattattcgagataggtttcctggcctgcagggtattcttgtgaaatacatggatccagagggtgatctggttacgatgacttcaacagatgatcttaggttagctgagtcagtcggtggtctatcaggaggatcactaaagttctttattgttgaagttagtccagaccgggaaccagcttatgaaggagtaagtaaagaggacatggtgaagggtgaagagaaaatgaatgatgttgttgagaatggtgaag

SEQ ID NO: 2894 - DNA, 281 bp, Gossypium hirsutum
  Clone ID: LIB3493-010-P1-M1-A12
aatggaggtcgccccaagcagcaataatacccgatttccacctccctatgcgtagcttcgaggttaaaaataggacatcggccgaagatataaaggctcttcgactgataacagccatcaaaaccccatatctacctgatggaaggtttgatctcgaagcatacgatggtttggtgaatatgcagattgaaaacggtgccgaaggggtaattgttggtggcacaaccggtgaaggccagctaatgagctgggatgaacacataatgcttatcgggcatact

SEQ ID NO: 2895 - DNA, 360 bp, Gossypium hirsutum
  Clone ID: LIB3493-010-P1-M1-A2
ccgattctagcatgattgcgtttgtgggaaatgaaggttatatcttgttggtttcatccaaaacaaaggagctgattggaacacttaagatgaacggaacagtccgctctctagcttttgctgataatgggaaccaattattgagctctggtggggatggacaagtctatcattgggacttgagaactagaacatgcatccataaggccgttgatgaaggctgcattaatggtacggctctttgtacatcaccgaatggaagaatgtttgcagctggttctgatagcgggatagtgaacatttacaatagggatgaatttttgggaggtaaaaggaaaccaatcaagactgtcgagaatc

SEQ ID NO: 2896 - DNA, 328 bp, Gossypium hirsutum
  Clone ID: LIB3493-010-P1-M1-A3
gacccatccttctcttcccttcagctgcctgctattgccttcaagtttcccgacgacgaaattaaataaagattaaacatggctgctgcagtaattaagaagttcttcattgcatcaatgttcatgtggatagctccccttgcaatattgtatggttttaatcataatttacttcctggttcaacaaatttatctccccatgctatgactctggtgagtggattcgttgctgtaatttcggtcaatatagttatcgcattctacatctatatggcaatgaaggaacctgtggataagcatgagccagatccaaagtttctcgctgatg

SEQ ID NO: 2897 - DNA, 369 bp, Gossypium hirsutum
  Clone ID: LIB3493-010-P1-M1-A4
tgttaaacaggtaccgtataatatttctatactggagatcagtgcgccgattattgctcccggtgttttatcagctcctgcaccgtcggcttccggtgttaacattaccggcttacttgagaaagctggttgtaagacgtttgctaatttgcttaccagtagtggtgtgttgaagacttatgaagcggcgcttgataaagggttgactatttttgcgccgtccgatgaagcttttaaagccgacggtgtacctgatctgagtaagttgaccaatgccgatcaagtttcgctgttagaataccatgcctcgccggattataaaccaaaggggactctaaagacgacgaaagatccgattactacattggc

SEQ ID NO: 2898 - DNA, 375 bp, Gossypium hirsutum
  Clone ID: LIB3493-010-P1-M1-A5
cggacgcgtgggttcagtaccaaaaaaaaaaaaaaaaaaaggcgtcatcggtcggtccgttgccatgtctccctcaaagatcattgctgttaaatggagaattcaccagaaaagaacaaaaaaaaaaaaaaagtggtgttattgccaatatatatttatacagagtcaggtccttcacaaatttctgggacacctaccgaaaagaaaacatcaagttaatttctgttgtgggatgcagcgtctttcacaatacaatcaaagatgttttgaaagggaagcaaaggtagagagtaaacggaaacaattgaataacaaagaatacaacaaagtttatttgagtcaaaagaaggatgcttcatgcctgaccacctagca

SEQ ID NO: 2899 - DNA, 465 bp, Gossypium hirsutum
  Clone ID: LIB3493-010-P1-M1-A6
tggaagcagagaatggtagctctcacgttctgccctttgctgggtcagacttagttttgagtccttctcagtggagtagtcatgttgttggaaaaatcagcacgtggattgacttagattcagaggatgagatctttcggatggattctgagactactttgaagcaagaaatagcatgggcctctcatctatctctgcaggcatgccttcttccttcacctaagcgagcttcatgcgctaattatgctagatgtgtgaatcagattctgcagggcctaagcaatatgcagctgtggctaaggattccactattaaaaactgatgaggattcactggatgtagattctgatgatctgagagactcttgggaactctggaattcatttcggctaatctgtgaacatcatagtcaactgtcacttgcccttgatattctgagtacgctaccttctgtgaactcaattg

SEQ ID NO: 2900 - DNA, 312 bp, Gossypium hirsutum
  Clone ID: LIB3493-010-P1-M1-A7
aagaacttcaccttaaatgatatagaaagagcgacaaatagctttgatgcttcacgggtgattggcgaagggggtttcggcattgtctatagaggcagtttagatgatggagctgcggtggctgttaaagttctgaagagggaggatcaacatgggggacaagaattcttggcagaagtggagatgcttagccgcctgcaccacagaaatctggttaaactgattggtatttgcactgaggacaatacacgttgtctcatctatgaacttgttccaaatggaagtcttgaatcccatttgcatggagctgag

SEQ ID NO: 2901 - DNA, 364 bp, Gossypium hirsutum
  unsure (1)..(364): unsure at all n locations; Clone ID: LIB3493-010-P1-M1-A8
caggtatcttgctgagtttaagactggtgctgagaggaaggaagctgccgagagcactttgttggcttacaagtctgctcaggatattgctcttgctgagcttgctcctactcacccaattaggctgggacttgctcttaacttctctgttttctactatgaaatcctcaactcacctgatcgtgcctgcaatcttgcaaaacaggcttttgatgaggctatttctgagttggatactttgggtgaggaatcttacaaagatagtacattgatcatgcaacttctncgggacaacctgaccctttggacatctgacatcacggatgaggctggggatgagatcaaggaagcttcaaagcacgag

SEQ ID NO: 2902 - DNA, 316 bp, Gossypium hirsutum
  Clone ID: LIB3493-010-P1-M1-A9
atagaatataaataatccatacttctcaaaaccctagcgctcctcccgttcttcattctactccatcttcactcccccacgtcccccaaaccctacaaaatggccgccgccgcgcgccctcttgtctccgtccaaaccatagagtctgacatggctactgatgccaccccaaccgttcctctcgctgatgtgatgaaagcctcgattcgacccgacatcgtcaccttcgtccacgacaatatatccaaaaacagccgtcaaccctatgccgtctccaaacgcgctggtcaccaaacttcagcttgaatcctgggta

SEQ ID NO: 2903 - DNA, 204 bp, Gossypium hirsutum
  unsure (1)..(204): unsure at all n locations; Clone ID: LIB3493-010-P1-M1-B1
gcttacaataaaaaatatgtaattatattattgtattaaaatttcgctcctcccggtctttattctactccatcttcacacccacaacatttctataaacngccaaatatatattatcttaaacatggtttttggtttaaaatctttaaaaagaccttcatttttgatgccaccccaaccgtttctctagctgatgtgattaaa

SEQ ID NO: 2904 - DNA, 303 bp, Gossypium hirsutum
  Clone ID: LIB3493-010-P1-M1-B10
ggcgatttgttaatgctagagcagatgctgttttgtcttcccagaggtctaacgcagagaaaagcctctataatgcattgacaactacctcaaaactgcgagaatctgttagagccaaaagaactgagttacagttgctgaggcaaaacttgaagctgatttccatcctcaaggggcaaatgatatttttggacgaatgggctctcttggaccatgattatttcagttcactatctggggctactgaagctctgaaggctagcacgttccgccttccagttgtttctggggcgagggctgatg

SEQ ID NO: 2905 - DNA, 309 bp, Gossypium hirsutum
  Clone ID: LIB3493-010-P1-M1-B11
caccaaacgagaaggaaaaactccaaagctggaacccagttcaagccggagaagctccttggcaaagcctttcttgaaacgccacttgtcaattgggtctaggtggggtagattgctatcagagaacgactctgctaggaagaaggggttttgggtaagatatcgaaaagattgaattccctcttctactggcatcaggtgaggagcctgtctgtttcatcatgaaagttcattacggtcagtaaatatgtgtttgttccccttacttcaaaaggtttgtacgagtcaggcttccaagttttaatgcaa

SEQ ID NO: 2906 - DNA, 302 bp, Gossypium hirsutum
  Clone ID: LIB3493-010-P1-M1-B12
cggacgcgtgggtgaggatgaaatgaaaatggaaaatggaggcaaccatggaaaggatatgcttttggaccatcttggagatgacattgttgctgcttctgcaactatggagcaacacgaagaagcaccttctgcagaagaaatgcaagaaaggatggatcaattcacctacatcatgcagcagaagtttctctctggtgaagattatgagtatttagattactctaaaatagatgacgatgagaccttggatgatcactggcttagggaagctaaccatgatgcaaaggagaagtattttg

SEQ ID NO: 2907 - DNA, 483 bp, Gossypium hirsutum
  Clone ID: LIB3493-010-P1-M1-B2
taaagagagtgaaagaccctcacactcccagtctccgaccttgcgagagccgagcgacccctcccagaatgctgcgtcgagcattggggctcttgccccgacccatagcagctgcaagggctcgatccttttccactgatctgcccgccgctcacactgccgatgccacctttatggaggcctggaacaaagtcatgcccaacatggatcctcctaagacccctctatctttcatgcaccctcgcccgcctaccccttcctccattcctcccaaactcactgtcaatttcgttcttccttatgcttctgagttgtccaccaaagaggttgacatggttatagtaccagccacaaccggacagatgggttttcttccaggacatgtagcaacaattgcagaattgaagcctgtgtgctgcagtgcatgaaagaaggaaacttcaaagtatttgtcagcagcgggtttgttttatccatgccaac

SEQ ID NO: 2908 - DNA, 226 bp, Gossypium hirsutum
  Clone ID: LIB3493-010-P1-M1-B3
gggaaaagtaaagaagtgagtacaaatgcttggtgggttgtatggagatctaccgccgccgtccgatgaggataaccaaccgagcagtaacgccacagtatggtcaagcagacaaagatggctctccactctcgagccttttcggttgctcgcgagactatctagacaaacaaccaaacctttcaaaaacactttttcgtcattcgttgctcccggggtgagcacg

SEQ ID NO: 2909 - DNA, 366 bp, Gossypium hirsutum
  Clone ID: LIB3493-010-P1-M1-B4
gttcttcagattatgataatgtccggtgggatccctgataatattacgtataatatgatggttcgcggtctttgtaagagaggacggatgcgatctgctattgaccttttggaagacatgagcttgagtggttgcccaccggatgtgattacgtacaatacaataatacgcagcatgtttgatcatggtatttttgatcaggccgttgggttttggaaggatcaattgaggaagggatgtcccccatatctaatcacctataccattctcattgagctagtctgcaggcattgtggaattgctcgggcaatggaagtattgcacgatatggcaatagaaggttgctatcccgacatcgtacttaca

SEQ ID NO: 2910 - DNA, 364 bp, Gossypium hirsutum
  unsure (1)..(364): unsure at all n locations; Clone ID: LIB3493-010-P1-M1-B5
cagtaaggttatttgttctctatgtggcacagaacaagaggctcaacaagtttgcatcaactgtggtgtttgtatggngaagtatttctgcaactcctgcaaactttttgatgatgatacatcgaagagacagtatcattgtgacggttgtgggatctgtaggattggagggcaggagaacttcttccattgccacaagtgtggttgctgctattcaattcttctgaaaaacagccatccctgtgttgaaggagcgatgcaccatgactgtcccatatgncttgagttcttgttcgaatcgagacagaatgtaactgttctgccatgcggacatacaattcacacaaattgtttcaaggaaatg

SEQ ID NO: 2911 - DNA, 372 bp, Gossypium hirsutum
  unsure (1)..(372): unsure at all n locations; Clone ID: LIB3493-010-P1-M1-B6
caaatacaccccgttgctcaagaaccctaggagaccctcactttattacgtcaatttgattggaattagggttggaagaaggattgttgatatcccaccaagtgccattgctttcaatccttccactggtgctggcaccattattgattctggtaccgtcttcacccggctagttgaaccagcctatgtagctgtccgggacgcattccggagacgagtaagggtggcgaacgtgacatctctgggtgggttcgacacatgttactcggtcccaatcaatgcanccgaccataacattatgttttcgggcatgaacgtgacattgccacaagagaacctactgctccacagcacagcaggcagcatcacatg

SEQ ID NO: 2912 - DNA, 421 bp, Gossypium hirsutum
  Clone ID: LIB3493-010-P1-M1-B7
ctttatttttcgtctctaaatctctgcatcatcatcgatcatgtctcttttattctccctactgctgttcttagccatgactggccattcaagtgctacttattgcttatgtaaagatgggttaggggatcaagctcttcaaaaggccctcgattatgcttgtggagctggagctgattgttctgcaattctacaaaaaggtggttgctataaccccaacactgtgaaagatcactgcaactatgctgtcaatagttatttccaaaagaaaggtcaagcacaaggaagctgtgatttttcaggcacttgctactgtagtgccaatcctccttcaaatattgcttctacttgcagctttccccctagtagcacaggcatgaccgcaccaactgggacaacaaccgggacaccaaccaccact

SEQ ID NO: 2913 - DNA, 410 bp, Gossypium hirsutum
  Clone ID: LIB3493-010-P1-M1-B8
tctctccatcgcaaacaaatctctctttttcaatctaccatggcggataagggtcgaccattgccaaaatttggtgaatgggatgtcaatgacccatcatcagctgagggctttacagttatcttcaacaaggctcgaaatgagaaaaagacgggtggaaagattgagtcgccaggggccaatgaccctgcatgcaagcaagaggctatcgctgcaaagccacaaaaaaaatggttatgctgcgtacaagctactcatgcagactaaagagatggctcttacgttgttaagagctaccaagagagtatattattatatatctacataaagcccttaccccctttcaaaacaatccagaagaccggagcccgtatcggaagctatgatgggtcatgatgggaatcgttgtg

SEQ ID NO: 2914 - DNA, 360 bp, Gossypium hirsutum
  unsure (1)..(360): unsure at all n locations; Clone ID: LIB3493-010-P1-M1-B9
gctcatgccactttctatggaggtggtgatgcgtctggaacaatgggtggagcatgtggttatggaaacctatatagccaaggatatggtgtcaatacagcagcattgagcactgcattgtttgacaatgggatgagctgtggtgcatgttacgagctgaggtgcgtgaatgacccgcaatggtgcttgcctggttccattgtggtcaccgccactaacttctgcccacccggtggctggtgtgaccctcctaaccaccactttgacctctctcaacctattttccagcacattgctcaatacaaagctggaattgtccctgttatttacaacagggtaagatgcanggaaaggggggga

SEQ ID NO: 2915 - DNA, 411 bp, Gossypium hirsutum
  Clone ID: LIB3493-010-P1-M1-C1
cctgatgattgttttctgggcctgacgcttgctgtgaaaccaagtgtttcaaaattagaggcagtccataatggctctcagcgaatggaagaggatatactgttttgtcctagtctgaaagatcatccagagcaatcagttttttggtcattgcttactcctgatcaaaatggaattcacacaccagttgaatcctccttgtctctctcatttagttcgattcagcatccaccaattggagttccacaatctgctgggtttgcaatcgcatcattgcagcctaatctcccagttcgtcaaaattattggctgtggcctcccccttccagcaaggttataccctctgactgagttggttggataatctaataaaggcctgtagagaatttgtaatttatttaatttgttttt

SEQ ID NO: 2916 - DNA, 373 bp, Gossypium hirsutum
  Clone ID: LIB3493-010-P1-M1-C10
cggacgcgtgggttccattgttgagcaaggtcttggtgttggtgatgtcatttctctcttgtggttcaaacgtagccttccacgatactgtactaaatttatcgagatatgcatcatgctctgtgctgaccacggtccctgtgtctctggtgcgcacaacactatagtgactgcaagagctgggaaggaccttgtgtccagtcttgtgtcaggtttgcttacaattggtcctcgctttggtggtgcaattgatgatgctgcacgatactttaaagatgcttacgataggggtcttacaccttatgaatttgttgaaagcatgaaaaagaagggcattcgtgtgcctggaattggtcacaggatccagagaggg

SEQ ID NO: 2917 - DNA, 301 bp, Gossypium hirsutum
  Clone ID: LIB3493-010-P1-M1-C11
cactattattgaacatatcggtcggttggaaggaacgaaggttgtctatgtcggggatggaaacaacattgttcactcttggttgttgctggcttctgttgttcctttccactttgtctgtgcctgccctaaaggttttgagcctgataaggagactgttgagaaggcacaaaaaactgggatcagcaagatcgagatcacaaatgatccaaaggaagctgttaaagatgctgatgttgtgtattcagatgtctgggctagtatggggcagaaggaagaagctgcccatcgtcgccaagtg

SEQ ID NO: 2918 - DNA, 253 bp, Gossypium hirsutum
  unsure (1)..(253): unsure at all n locations; Clone ID: LIB3493-010-P1-M1-C12
cccacgcgtccgtgggagcaagcatatctcctgtttctgcttatcgaaattcccaatatgacatcagtatacttgtatggaaggatcctaaggaagggcattggtggatgcagttcggtaatgactatgtgttgggttattggccttncttcttattctcctacttggcggacagtgcttcgatgattgagttgggaaggtgagtgtgaattcagaaccagatggacatcacacttncactcaaatgggcagt

SEQ ID NO: 2919 - DNA, 392 bp, Gossypium hirsutum
  unsure (1)..(392): unsure at all n locations; Clone ID: LIB3493-010-P1-M1-C2
gagccattgtggacgcgagcagtaattggggaatgttccaagttgtgaaccatggcattccccatgaaaccgtaaggaagctgaaagaggtcggaaaggctttcttcgagctcccaccacaggaaaaggaagcttacgccaagtccccgggatctcaatccattgaaggctatggaacgaagcttcaaagagaagttgaagggaagaaagcttgggttgatcatctcttccataagatctggcctccttctgaaattaactatcaattttggcctaaaaacccaccttcttacagaaagaataacgaggaatacgcaaagcacatgccatggngggtcgacaagctatttagatgtctgtcattagggttagggctggaagggaatgagatg

SEQ ID NO: 2920 - DNA, 347 bp, Gossypium hirsutum
  Clone ID: LIB3493-010-P1-M1-C3
ctgaagcagctttagctatacagatgggaaatgctagaattctatgcggtaaaccaattaagtgttcatggggtagcaagcctactgcaccaggaacaagctctgcccctttgcctccaccggctgctgcacatatgcctggtttttcagctgccgacctggctgcctatgaacgacatatggcaatgagtaaatatggcggtgcacaggtaatgggtatgatgcatccacagggtcagcacgcccttaagcaagtggccatgggaatgggtgcggctgcagctggtcaagcaatctatgatggcggataccaaagcgttgcaacaactcaacagcttatgtactat

SEQ ID NO: 2921 - DNA, 362 bp, Gossypium hirsutum
  Clone ID: LIB3493-010-P1-M1-C4
gtgctctccataaagaactggatgaagtctcatgtccaatctgcatggaccatccacataatgctgttctcctgctgtgcagctcgcatgacaagggttgcagatcttacatttgtgacacaagttacaggcattcaaattgcctagaccgatttaaaaaattaagggctaattctagtaagagtccaatattacctcatcccttccccctaaaccctccgaattctagtgcttttgatttgaacttggcattaagaactgattttgttgaaggtaatggaagtcaaaatctgaatgaaaccaatagcatggcaggaggatcagaagataatatccgagagtcaactaagaatcttgattca

SEQ ID NO: 2922 - DNA, 416 bp, Gossypium hirsutum
  unsure (1)..(416): unsure at all n locations; Clone ID: LIB3493-010-P1-M1-C5
gcccctgggagaatgaatgccatctacactgcagggctgatggctaggaatagagaagaaggggagactgatgtgtttgtgcatgatgtgaacagagttgttgaagataagttctcaatggctnttctttgtgaaggctatttgagggagcaacaaggattactaagacatttcaccattcccagtcacaggtctcgctctggaagacccttttgtccttgattctttcaatttcgagcctcccaacaaggatttggaagtcgtgctattggtattttattttttcccttttcgattctcagttttatccgacacaattttcatttttaatgccttatcttttagatctatgtntataaagtatagcaatntaattgttttttagtttttatttttttctccttagtacaaagaaa

SEQ ID NO: 2923 - DNA, 457 bp, Gossypium hirsutum
  unsure (1)..(457): unsure at all n locations; Clone ID: LIB3493-010-P1-M1-C6
ttaaaaagaaaaaaagagagatggcgtctgtaataaaatctgcaatcttaattctgtcggtgtttttatctgtacgcttcagttcgggtgttaggttgctccaggaacagcccaatgatgaccccaaaaacatggacgctattcctcccattgatgcactcaaccctaccgagttgaatggacccggtgttggcattcacgaagatcatgttgtcccaaaaggtgctgaaattggtactctnggttttggtttgaaggtggtcctgataaatgtngttcttctggatgttccggtaattgtaatcctggtggttcgttctaccatttnctcaaattccagaaatcccaagaattccagaaatcccacaaatcccacagatcccacaaatcccacanattccactaatcccacagatcccacaagttccacagatcccacaagtcccaaaaatcccac

SEQ ID NO: 2924 - DNA, 318 bp, Gossypium hirsutum
  unsure (1)..(318): unsure at all n locations; Clone ID: LIB3493-010-P1-M1-C7
gttcgaagattttttttcctttttgtggtttacagcttgagatctgagagcaaagaccctgtttttcattgggggttttttgtttgaagttctttggttgtaaacctgattttgttttttaaaataagacttgatttttagttntaatatatctcctttttattattttgagataaatttttcattagttttttttgggtcttcggaattggaatttttggggaaatgaggtttcggttattaggagttgttctcaagcaacaaaccttaaaacagaattagggtttaaggattcaaggtttagtttcgggaaattta

SEQ ID NO: 2925 - DNA, 324 bp, Gossypium hirsutum
  Clone ID: LIB3493-010-P1-M1-C8
cttctcttatccatcttccaccttcgccaactccctcaaacctcatccaccaaacatgcctaccttaacctctctgaaacgatcctcgccgtcgatgctccatctctcccttatccaacaacgactcctaacctgccagttctcgtccctgcctctgaccgacgcttcaaacatcgaccccaacaataaaaggggttccttttcccgcactttcgtaaaatgggtctccggactcgctggtggttcgagcttaggtgcagtctattggtggtactcaacttcagtttcggaattgggttctgcttttttaaagaaacccttttt

SEQ ID NO: 2926 - DNA, 316 bp, Gossypium hirsutum
  Clone ID: LIB3493-010-P1-M1-C9
gttttctctgtttgccatttgccttaatcatcttcctctttctttaaaacttcttcctatttaatttctgactaaacttgcgctgaattccatggctactgcagaggttgtaacagctcaaactgcaatccatgaggagaaacctgaagaagtggtcaaggttgaagaaattgcaacagaagaggtagtggctgttgctcctgcaacagaacctgttgctgaagaaccaaaggaaccagtgcctgaagcagcatccgaagaaccccaggctccagaaactgaagccacagttgaaactgaatcaaagggaggtggt

SEQ ID NO: 2927 - DNA, 405 bp, Gossypium hirsutum
  unsure (1)..(405): unsure at all n locations; Clone ID: LIB3493-010-P1-M1-D1
cggacgcgtgggcggacgcgtgggcgcaaactctctctagaactacagaaaaacaagggaaaatgactgaggcagtgataaggaagaagccaggaatggcgagtgtgaaggacatgccacttctccaagatgggcctcctccgggtgggttcgcccccgtcaggtacgcccgtcggatacccaacaagggcccaagtgctatggctatctttctagctgcttttggtgccttctcgtatgggatgtaccaagtcggccaagggaacaagatccgcagggcactgaaggaagaaaagtttgctgcacgtagagcaatattgcctgtgcttcaagctgaagaagatgaaagatttgtcaaagagtggaagaagtatccngagtatgaagccggagtgatgaaagatg

SEQ ID NO: 2928 - DNA, 328 bp, Gossypium hirsutum
  Clone ID: LIB3493-010-P1-M1-D10
cgtaatcttggtgttcatatatcgaaggttaggtcgcttactcttgatgtaaaagtgtgggacccatctgttataagtttgtttcaatctctgggcaatacctttgctaactcagtttgggaggaattgttgcactccagaaatgctttccacgttgatcttactccaagcttttccaagtctgataaaccgcagctgctgcttatgggaaaaccttgtcattctgattctatatctgtaaaggagaagttcattcatgcaaagtatgcagaaaagctttttgtttgcaagctgaaagatgagcaacatcctcaatcagttgcacaac

SEQ ID NO: 2929 - DNA, 115 bp, Gossypium hirsutum
  Clone ID: LIB3493-010-P1-M1-D11
gttctattacaattaccggccatttttctaaactccatcaatattcaaaaagaacttcaatggctttaaagaaacctggtttgattgctttatttgatggtgatggaacacttac

SEQ ID NO: 2930 - DNA, 279 bp, Gossypium hirsutum
  Clone ID: LIB3493-010-P1-M1-D12
atttcaaacttctggaaagcaagcacttcaggatgcactaaggtctagcttggaaacgtctgttattccagcatttgagatgtcatgcaaatctatgttcgagcaaattgatgtcacatttcagagagggctaatggaacacacagctactgctcagcagcaatttgaaaattcacattcttcccttgccgttgctttaaaggatgctattaattctgcaagttcaatcacacaaagcttatgtggagaaatggccaatgcacaacgaaaacttctagc

SEQ ID NO: 2931 - DNA, 363 bp, Gossypium hirsutum
  Clone ID: LIB3493-010-P1-M1-D3
cgattttctatttagttttctcttcctccaattaagatgcagatcttcgttaagaccctgaccggcaagaccatcaccctcgaagtcgagagttccgacacgatcgacaacgttaaggcgaaaatccaagacaaggaagggatcccaccagaccaacaacgtctcatcttcgccggaaaacagctcgaagatggccggaccttggccgattacaacatccagaaggagtccaccctccatctcgtcctccgtctacgtggtggcatgcagatcttcgtcaaaaccctgaccggcaagaccataactttggaagtcgaaagctctgacaccattgacaacgtcaaggccaagatccaagacaag

SEQ ID NO: 2932 - DNA, 366 bp, Gossypium hirsutum
  Clone ID: LIB3493-010-P1-M1-D4
gtttcctacactctcacatactcacagcaaaaaatgccgttcaagaggtatgttgagatcgggagggtggctctcgttaactacggcaaagactacggcaagttggttgtcatcgttgatgttgttgaccagaacagagctcttgttgacgccccagatatggtcagaggccaaatgaacttcaagaggcttactttgacagatatcacaattgacattccccgagttccaaagaagaaaacattgattgaagccatggagaaggctgatgttaagaacaagtgggagaatagctcatggggtagaaagctgattgtccagaaaagaagggcagctctcactgacttcgataggttcaagcttatg

SEQ ID NO: 2933 - DNA, 376 bp, Gossypium hirsutum
  unsure (1)..(376): unsure at all n locations; Clone ID: LIB3493-010-P1-M1-D5
gggatccctccagaccagcagagacttatctttgccggtaagcaactagaagatggccgtaccctggctgattacaacatccaaaaggagtccaccctccatttggtgctccgccttcgtggaggaatgcaaatctttgttaagaccttgaccggaaagacaattactttggttgagagttcagataccattgacaatgtcaaggctaagatccaggacaaggagggtattccgccagaccagcagaggttgatctttgctggtaagcaattagaagatggtcgcaccctggctgactacaacatccaaaaggaatccaccctncatttggtgcttcgtcttcgtggtggtattgcaaatatttgtgaagactctt

SEQ ID NO: 2934 - DNA, 358 bp, Gossypium hirsutum
  Clone ID: LIB3493-010-P1-M1-D6
gtttcactttagctgtctgatttgtgtgtgtttgtttgatgggaataattttccgggaaaatacccggtcatgggaaagttatcttttaaggattcactaaaagcgctcgaagctgatattcaacacgccaatactctggcttttgattatccgagggagaaagatggagcacgacttcaaatgagactgtcttacagccctgcagctcagtttttccttttccttgttcagtggaccgactgccaactagccggtgcccttggtttgctccggatacttatttatatgacctatgccgatggcaagacccaccatgtctgtgtatgagaggaaagccagcattaagagagttttatg

SEQ ID NO: 2935 - DNA, 363 bp, Gossypium hirsutum
  Clone ID: LIB3493-010-P1-M1-D7
agaagattcacgacagatggctgtcaaaaagtgcttgtagttccgagaatagtgaggatgatattgaacagctcgacttaaaaagcttctgggggctatttgttatatgtggaattgcatgtatgcttgctctccttgtgtacttctggttgatgttccgcaaattcagccggctgcctcccgaggaacttgatactactagtcctagtacctcccgttccactcgtcttcaaacatttttgtcatttgttgatgagaaggtagagaaaccaaaaagcagctcaaaaagaaaacgcgagagtatgtctcgaaatggatatcatataaatgatgaatcgccacataagtctgggaggatggaca

SEQ ID NO: 2936 - DNA, 359 bp, Gossypium hirsutum
  Clone ID: LIB3493-010-P1-M1-D8
ggcggagttcccatggcatttgctgggacggaggcccctgctgcttatggagaattgatttctattgggggccttggaccttctgttaatgccaaattgagttcaactgtcgctgatattcttcaaaccaagctctcaattgatagctcccgcttctacatcaaattctatgatgttcagcggtcattctttggatttaatggttcgactttctgatgaatggctgaaaaagcatccggggtccaagtcagaatcatatatgtgctggaatgaattgtttttatcaattgaagatctctctctctctctctctctctctctctctctcaagactttcctcccttaagaaattggaactt

SEQ ID NO: 2937 - DNA, 406 bp, Gossypium hirsutum
  Clone ID: LIB3493-010-P1-M1-D9
gtaattgttggatggtattctactggccttggagtcacaggtggtagtgcattgatccacgatttttattctagggaagtcccgaaccctgttcatttgacagtggatacaggatttaggaatggagagggcacgataaaggcctacgtttctgtcaatttagctcttggagaccgacagcttgctgctcaattccaagaaattccccttgatctacgtatggttgaagctgagcgactggggtttgacatcctgaagacaacagcggttgacaaactgccgaatgatttggaaggaatggaagtcacaatgcaaagactgttggctttaatagatgatgtctacaaatacgtagatgatgttgtggaagggcgtgttgctgctgataatagcatcggcagattta

SEQ ID NO: 2938 - DNA, 348 bp, Gossypium hirsutum
  Clone ID: LIB3493-010-P1-M1-E1
gaaaatccgaaaatttgaaaaagaaaaaggaaaatgaagaaatcaggagcagcagagaagaggaaagctcgaagatcttcggcgtccgtacaaaatgttggcagagatcccagctccgacactcctcctaggaaacaagctgccaagcaggatgtatatcaattgtttgctgagaaagttagagaccataaagatttggagtctagatgggctgtcttgcaagaaactcgtgttgaatattttagggggaaggattttgtaagctttatgaaaaatcatcctgagcttaaagaaatactggaatcagatagagatcttgaaactgaagatattgccaataatttgtac

SEQ ID NO: 2939 - DNA, 411 bp, Gossypium hirsutum
  Clone ID: LIB3493-010-P1-M1-E10
ctcgtatccgctttatgaacctgggtcatgttcctttgtcgatcaccagtttagttgtttcgcccatggaaggcgtgatataggttatctcaaatggaaatggaagcctaaaggctgcaccttgccaaggttgaacggcgggcacatgttggagatattgaggggaaaacgactggtatttgtgggggattccttgaacaggaatatgtgggaatctctactttgcatcttgaaaagtgctgcaaaaaatccaaaaactgttcatgaagttcccggaggacgttattttcgaggggagccttcctctagtttcattttcaatgattataattggtccggcgagtttttcgtattctccgttcttggtcccacaatggcaaatgctggacaaaaacgggacaaagaaaaata

SEQ ID NO: 2940 - DNA, 385 bp, Gossypium hirsutum
  Clone ID: LIB3493-010-P1-M1-E11
ggcttgacgttcccctttgctcccttcttccagaagccaaaagtttgagttaagaacaatggcttttgctgcaatgaagccgacaaaacctggtttggaggagtcccaggagcagattcacaagatcaggatcactctctcctccaagaatgtgaaaaaccttgagaaagtttgtgctgatttggttcgtggtgccaaggataagagactgagggttaaggggccagtgagaatgcccaccaaggttcttcacatcacaacaaggaagtctccctgtggtgaaggaacaaacacatgggatagatttgagctccgtgttcacaagcgagttattgatcttttcagcttccctgatgtggtcaagcagatcacatctatcaccatt

SEQ ID NO: 2941 - DNA, 296 bp, Gossypium hirsutum
  Clone ID: LIB3493-010-P1-M1-E12
caaccgtcccttctctacccttctctcctcctctgtatccggccttgcacgtgtcctctgggtttttcttggaacaattaacttctttttttttatcttctgttaaacctctccggtgatagcagcgcctctggatccccgcatctgagccgactcgacgagaaagccgccacacttgaagctgctgatcttaaaaaaatcggactcgccatcgacttacttcttctcgacgagccttcgtcgccggcggttaatctaacacttgattccgacaatggaaaaaaccctctccgacg

SEQ ID NO: 2942 - DNA, 328 bp, Gossypium hirsutum
  Clone ID: LIB3493-010-P1-M1-E2
gaagaagaagaagaagcaaagctgtataagttaagggtttttcaaagatttttgttgccataatgtgaacctgatttccatccacctaggattgccaaattaggcaaccttaactacaagctaaatcatcaaagaagaccttttcttgttttcttcggaaacagtagttactcttcttgtcgtgcacaaagattgaagatatcgtctatcattgtaatttacagctcctttgcttgctcctcaactacaagccgtttgatatagaacttgtgaagctaggcttttcagtttgtttgttcatattagaaagagaaacacatttggatta

SEQ ID NO: 2943 - DNA, 415 bp, Gossypium hirsutum
  Clone ID: LIB3493-010-P1-M1-E3
gctgattttagtctagttaatgagcttggaagccaggcacatcgagacctggcaagggaagctgtgagaaaatcacttgtattgctgaagaacgggaaacctggaagtacacctctactgccccttccaaaaaaagcttcaaagatcctagttgctggcactcatgctgataatttgggttatcaatgtggtggatggacaattaattggcaaggattcaatggcaataactctacaagggggacgacaatcctcggtgccataaaatctactgttgatcagagcactgaaattgttttccgtgagagccctgatgccaactttgtgaaatctaacaaatttggttatgccattgtttgtggtggtgagcccccttatgccgagactgcgggggatagcacaaaccttacgatga

SEQ ID NO: 2944 - DNA, 332 bp, Gossypium hirsutum
  unsure (1)..(332): unsure at all n locations; Clone ID: LIB3493-010-P1-M1-E4
aaaaacgattcgattacctttgaaaaacgagattcgctttttatttctctgtttcaaaaggattacaatggttcgtgttattctattaggtaaatccctatacctttttttttgtttctctctgcttctaaaaactctgttttttgattccctgctattcttctctctgcttttgtgtgggtgtatttctgctatcaggtctttctccctacctgtctttttacagattaaaaagaaggctttatagcctcgactactataagttntggaaagaaatctccgatttctttccgtatttgcttcgcatgtctgctgagattntctttcctttt

SEQ ID NO: 2945 - DNA, 391 bp, Gossypium hirsutum
  unsure (1)..(391): unsure at all n locations; Clone ID: LIB3493-010-P1-M1-E5
aaacatacaacattctaatatgcattcaagagatattatacgtttcggcacacatcatcgcatattctaggaaaggtaaagcatcgtcaaatccactagaaattcacaatattagaaaacagcaaattcttttacttgattcgctaactgctagggtatccaagcgaattacttcatgtatttcagcaggaatttcctgtggaagtcattccttatggtatcattaatgaagcgcttttgaggcttggtttcaccgcgagcctggttcttgaacaccacatcatcatcccaccttctttttacaccaaaagatgttggattaatgagtagtggatttnctcgaagaagctcagcttctttggcttttagctgttcttcttgctctagtttt

SEQ ID NO: 2946 - DNA, 328 bp, Gossypium hirsutum
  Clone ID: LIB3493-010-P1-M1-E6
ttcaaaacttaaaagagcaaaattttcgaatttaggctaattgtgagaaattccaagactggctcccttacaattaaagttacaagctgtgatcagatgtcagaaagtcttcgtacactgctccatgtgctcctagatctgctataaaagtagagaaggaattcccggaaaaaaaatggagtgactggagctattagtttcatggcattgaacacatctacagttattcatgtacttgacacaaagccgaagaatttctgggcaactagaagaaactccttctggttcatagttagattatgcatggccttcctttttaacttcatat

SEQ ID NO: 2947 - DNA, 267 bp, Gossypium hirsutum
  Clone ID: LIB3493-010-P1-M1-E7
atttaacccaaaaaaaataaaaaaaggttgtataccagacttcaggcatggcaactctaaggtttaactcactgacagggaccctagaaaagaactcgacatcatttttttcttcaaatccaaggttgtgttgggcttactttcaatgtaataacaaaggtgaaagaagggcatcgagaatgacagtcaaagcaatgggagcagccaaatacaaaggaactcaaatgagggaaaagaagctaactgagatgattgggaaaaaagtta

SEQ ID NO: 2948 - DNA, 318 bp, Gossypium hirsutum
  Clone ID: LIB3493-010-P1-M1-E8
aaaaaagtgaggatcaagcatagatggaaaacatgggagttctaggcaaggtggtggattaccttctattgttatcattcttcagcatcacattaacagctcagttggacatccccgagtccatcctcccccacgcctacaatcccttctatcaagtttataccacgttaacccaagattatttggtgcttgagcagcctgcttttttcaaggcacttatgacgttggaacttgtttaccaactccctctcgctttgcttaacatctatgggttgttatactctaagccctggttcaacaccacctgccttctctttg

SEQ ID NO: 2949 - DNA, 296 bp, Gossypium hirsutum
  Clone ID: LIB3493-010-P1-M1-E9
tttgaatattcctgaacatgagtatggacttgtgtttactgtaagtaggggatctgcgtttaagttgttggctgattcatatccatttcataccaataagaaattgttgaccatgtttgattacgagagtcaatcggtgaattggatggctcagagtgctagggagaagggtgccaaagtttatagtgcttggtttaaatggccaactcttaagctttgttctactgatttgagaaagcagatttcaaattaaaagaagcgaaagaaggattctgctactggtctttttgtttttt

SEQ ID NO: 2950 - DNA, 413 bp, Gossypium hirsutum
  Clone ID: LIB3493-010-P1-M1-F1
ggtcaaaccaaagggagtggtcaatgaggcagtagagcaaattgcttatgctgaccgcataattgtaaacaagactgatcttgttggtgagccagaaattacgtccctggttaagcggataaggagcattaatggtatggctcatctcaagcacacagagtttggaaaagttgacttggagtatgttcttgggataggaggctttgatttggagaggattgagagttccgtcaatgatggtactaaagaagatcatgctcaccatcatgatcatgatcatcaccatcttcatcatcatgaacatgagcataaacatgaccatcatcatgatcatactcatgacccaggagtttcctctgtcagcatagtttgtgaagggagcttagatctaaagaaggctaacatatggcttg

SEQ ID NO: 2951 - DNA, 367 bp, Gossypium hirsutum
  Clone ID: LIB3493-010-P1-M1-F10
cccacgcgtccgctgctctgcaattattctcgcgtttaattttcttcatccagctaagtattcttagtttcttgttcttttcttttccttctccctttcgagtcttcactttttttgtctcatttttttcttttatcttagatctggtttagaactagggctttttttttcttgacttgcttgtttgttatttttcgactatattgttcatgtctgatctgcgaatgcggagttgagtctttattatagaactatttcaatgattttagattttctatgagctacgccatcctcatgcgtcgaattcgtattcttcactcggtttcagtggtttcccttactggttctacgtttctcatgaatcaac

SEQ ID NO: 2952 - DNA, 356 bp, Gossypium hirsutum
  unsure (1)..(356): unsure at all n locations; Clone ID: LIB3493-010-P1-M1-F11
cccatttcatatttcatacccaatcatctctctccacctcccctttcttcttcaaacagctgtttccccctcaccaaatcaccccctataaaacgcaccttcactcatttctttttcattcaaattttctctgtaacaatggcggcttctgcttctatttacaatcttctcactctcctgctcctttctggcatcccttttaccttctccgagctcgttaaagagcagcctctggtgttgaaataccacaatgggccactcttgaaggggaagatcactgttaatctcatttggtacgggaagttctncccaacccaacgctccataatcgtcgatttcaataactctttgagctc

SEQ ID NO: 2953 - DNA, 283 bp, Gossypium hirsutum
  unsure (1)..(283): unsure at all n locations; Clone ID: LIB3493-010-P1-M1-F12
ggtctttgaaatcaatggcaacactctctcgntngccctcttcgctgatgtcaccaactccaaggaactcctagactctatgcaagccggaacgcttgatcctgaagttgcgtttcttaatgcatcacttattccggatgtttttccagttctagcagcagtgcataagacacttatttccaagtcacgtgagtcgttgactacacgaacactccattccgaacttggttacaattactctgggtctaaacatatcaacgaatccctgaaacgatgtggtatt

SEQ ID NO: 2954 - DNA, 348 bp, Gossypium hirsutum
  Clone ID: LIB3493-010-P1-M1-F2
gacagaactaaatgatggaaaaccaaggaagattaagaatgcaaagccatattcttttactcttgaggaggataccacccagttcggtacgtatataaaaggtggtattgttacacaagtgaaacagcccaaggtattaaatttcaaaccactaagagatgctatcaaagaccctggtgattttctgctgagtgatttttcaaaatttgatcgtccacctctgttacacttagcattccaagcattggataagtttgtctctgatttgggacgctttcctgttgctggttcagaaggggatgctaataagcttatttctattgctgggaacatgaatgagagcttggg

SEQ ID NO: 2955 - DNA, 366 bp, Gossypium hirsutum
  Clone ID: LIB3493-010-P1-M1-F3
cgacatctacaaatggtgacctcggtgctacctagagtagaaagcttggcaagcagtgggattcaatcaatcccgaaagaatatatcaggcctcaagaagagcttacaagcataggtaacgtgtttgaagaagagaaaaaagaggaagggcctcaggttccgaccatcgatttgacagaaatcgagtcggaggacaaagaggtccgggaaagatgtcagcaggagctgaaaaaggctgccatggaatggggtgtgatgcaccttgttaaccatggcatctccgaggagctcatggatcgtgttaggaaagttgggcagaaattctttgaactccctgtggaggagaaagagaagtatgccaacgac

SEQ ID NO: 2956 - DNA, 375 bp, Gossypium hirsutum
  Clone ID: LIB3493-010-P1-M1-F4
cggacgcgtgggcttccagaaatggaatccctgaaaatattagagcccctggttattctcagactccttcaatgttgaatttccccatgaatcatgcttccgaactacctggtaacagtttcgctctcggaagtacacctggggtatctattctcacatcaaaaggggcttttcaggaagatgttaactcagaaattaaaggatctggagggttgatgcccagttacgatgtatttaacgacttggatcaacatataccccaaagttgggagctacagaatgtcggcatggcatttgatacctctcagcattcaaactctcttcaagggcaacctcatcttacacagtctgctttaggccaaccaaggattttct

SEQ ID NO: 2957 - DNA, 459 bp, Gossypium hirsutum
  unsure (1)..(459): unsure at all n locations; Clone ID: LIB3493-010-P1-M1-F5
gaaagatttaaaaagaaaaaaagagagatggcgtctgtaataaaatctgcaatcttaattctgtcggtgtttttatctgtacgcttcagttcgggtgttaggttgctccaggaacagcccaatgatgaccccaaaaacatggacgctattcctcccattgatgcactcaaccctaccgagttgaatggacccggtgttggcattcacgaagatcatgttgtcccaaaaggtgctgaaattggtactcttggttatggttntgaaggtggtcctgataaatgttgttcttctggatgttccggtaattgtaatccctggtggtttcgttctaccatttcctcaaattccagaaatcccaagaattccagaaatcccacaaatcccacagatcccacaaatcccacaaattccactaatcccacagatcccacaagtnccacagatcccacaagtcccaaa

SEQ ID NO: 2958 - DNA, 343 bp, Gossypium hirsutum
  unsure (1)..(343): unsure at all n locations; Clone ID: LIB3493-010-P1-M1-F6
gttccatgtgaacggcacttgcacatgggttagtcgatcctaagagacgggggaagcccgtccgacagcgcgtccagcgcgagcttcgaaagggaatcgggttaaaattcctgaaccgggacgcagcggctgacggcaacgttagggagtccggagacgtcggcggnggcctcgggaagagttatcttttctgtttaacggcctgcccaccctggaaacggctcagccggaggtagggtccagcggccggaagagcaccgcacgtcgcgtggtgtccggtgcgcccccggcggcccttgaaaatnccgaggaccgagtgccgtctgcgccccggcgtactcat

SEQ ID NO: 2959 - DNA, 273 bp, Gossypium hirsutum
  Clone ID: LIB3493-010-P1-M1-F7
attcataagctttaagctttttatttcaagtgtttttcttttcctatatttaaattttagggacactactgcataatttgcttttcaataacaccctaaatttggtttcccagaagaaaaaaaaagaaaccaatcgttgcaactgataaagaaataacaatggcaggtcaagttctcgttgctgccctcgttttcatggcggttgttgtggcgtttgcgggggattcagcgccgtctccgtcccctaaaagttcatcgccatctaaagggggg

SEQ ID NO: 2960 - DNA, 340 bp, Gossypium hirsutum
  Clone ID: LIB3493-010-P1-M1-F8
gtggggaagaccattctcttgtacttctcagcccattggtgcccaccatgccgtgctttcacaccgagccttgttgaagtatataagaagatcaaggaaaaggatgatgcatttgaagtgatttttatttcgagcgacagggaccaatcctcctttgatgactattattcaggaatgccttggttggctctttcattcaatgatgctcggaaatcatcattgagtcgcaaattcaaagtgcaaggcattcctatgcttatagcactcggaccaactggaaaaactattaccaaagaagccaggagtcttgttattgcttatggggcggatgcttattctt

SEQ ID NO: 2961 - DNA, 369 bp, Gossypium hirsutum
  unsure (1)..(369): unsure at all n locations; Clone ID: LIB3493-010-P1-M1-F9
cttcttctgatcagaaactagatgaaatggcttcaatggaggttggaagtgacaaggatgttaaagttcatgtcttctcttcattatcagagttgatcgaaaagctgcacgagaagtggagtccggtgaagaagaaaccatatccggctatgtattccagcgttttcggagggatcattcttgaccctgccatgatggtaattcccatagatgatcacatggttcatcgaggccacggtgtattcgatacagcagtcattctagatggttacctctatgagctggatgctcatttagatcgcttncttcggtcggcatcgaaagcaagaatcacccttccatttnctcgatcaactcttcgtagtattc

SEQ ID NO: 2962 - DNA, 415 bp, Gossypium hirsutum
  Clone ID: LIB3493-010-P1-M1-G1
ctgggattttaagcttaaaaccctaaccctagaaatttattcggaattcatcgctggtgctatttgacctcattcaaaatgcctcgccgtagctctggaaggtctgcttctcgccctgcccctcgtcctgctcctgctcgcaaccctccacctcaaccagctcatcatgctcctcctccagctcctgctcagagtggaagtggtggatccttgctcggaggcataggctctaccatagctcagggcatggcatttggtactggaagtgctgtagctcacagggctgtggatgctgtgatgggtcctcgtactattcaacatgaaactgtggtttccgaggctgcagctgcccctgcaccagcaactacttccagagtttagctggcactgattcatgcagcatccactacaaggc

SEQ ID NO: 2963 - DNA, 329 bp, Gossypium hirsutum
  unsure (1)..(329): unsure at all n locations; Clone ID: LIB3493-010-P1-M1-G10
cactgggttactggcaccataatgcttctagcaagtatcttaagctggtcaagttactttattttgcaatccttcacgttgaagatgtacccagccgagctctctcttacagcttggatatgcttgatgggaacgatcgaaaatgcagtagcgtcccttatcatggtccggggtataagtgcttggaaactaggttgggattcaaggctccttgctgcgtcttactctggaatagtttgctctgggattgcgtattacgtgcaaggagtgnggatccgggaacgaggaaccggtgttccttacgtcattcagccctctatgcatgatca

SEQ ID NO: 2964 - DNA, 280 bp, Gossypium hirsutum
  Clone ID: LIB3493-010-P1-M1-G11
gggaaaccctcttcacctcaaatctttgaaccacatctcccttgtgtgtagatcagttgaggaatccatgaacttttatcaggatattcttgggtttgctccaatcaggagacctggatcatttgactttaatggggcatggttgtttggatacggaattggaatacatctcctgcaatcggaggatccagagagtttgcccaagaaaaaggaaatcaatcccaaggataatcacatttctttccagtgtgagagtatgggagcagtggagaagaagctg

SEQ ID NO: 2965 - DNA, 91 bp, Gossypium hirsutum
  Clone ID: LIB3493-010-P1-M1-G12
agggatcaccatgaacaggtgcacacatcagacttaaatgctgacagaatgaccatgcgtgcacaaagtgtgccatagcacgatgttcact

SEQ ID NO: 2966 - DNA, 341 bp, Gossypium hirsutum
  Clone ID: LIB3493-010-P1-M1-G2
gagaactgcaggtttaagacttttctctagatcaagtgaacaaaaaattttggtcatagcgtggaaatgcttggataagactttcttgttgtaagagtagtattttcgtttgaagaattcacttctttttaaggtcagaagatcttcaggatttccagtaaaatgattatggataatcctgatggcttgggataaatctattaagactagaaattacatctgatctacttgattgatcgaattccaccagtctcttaacattcttgtaaatctggaaacaaattctaacaggatattgtaatgactttcttctgttaattttctgggtcaagccatgagtg

SEQ ID NO: 2967 - DNA, 326 bp, Gossypium hirsutum
  Clone ID: LIB3493-010-P1-M1-G3
cggacgcgtgggcgatttcaagatggagattactataaaggagtctgctattgttcgtccagctgaagacactcccaaacggagtctatggaactccaatttagatatagtgatgacaagataccacatccctactgtatactattacaagccaaatggttcttctgatttctttgatactggaaggcttaaagaagctttgagcaagattcttgtcccattttaccctattgctggaaggttggggtatgatgaaaatggaagacttgagataatatgcaacggtgaaggagttttattcgttgaagctgaaactacttcagtca

SEQ ID NO: 2968 - DNA, 387 bp, Gossypium hirsutum
  unsure (1)..(387): unsure at all n locations; Clone ID: LIB3493-010-P1-M1-G4
aaattacagtgagaagcgacttcgtgatgcttatgaaaggctcaagaagagaggaattcctctagcttcgaaccaagtgaattacagtctcatatacaggttacctgagcagaatggagtaaaagctgcttgtgatgagcttgnggtcacgttgattgcttattctcctattgcacaaggtgcccttaccgggaaatataaaccagaaaatccgccatctggacctagaggccggatttacactccggagtttttaactaagctccaacctctccttatcagaattaangaaataggagggaactatgggaaaactccaacacaggtggtgctgaactggtaatagcacangagaatgtgtgccaatccaggagccaaaatgctgac

SEQ ID NO: 2969 - DNA, 327 bp, Gossypium hirsutum
  Clone ID: LIB3493-010-P1-M1-G5
cggacgcgtggggccggcagaagcagagagcctacgcttaaatctcaagcaatgacattcaagcgtaggaatggtggccgcaacaagcacggccgtggccacgtcaagttcatccgctgctctaactgtggaaaatgctgtcccaaggataagtcgatcaagagatttcttgtgaggaacattgtggagcaagctgctgtcagagatgtccaggaagctggcgtctatgacacctacactctgcctaagctgtacgtgaagatgcaatactgtgtttcgtgtgcgaatccactctcatgtttgtgagggtacgatcccgtaccaaca

SEQ ID NO: 2970 - DNA, 375 bp, Gossypium hirsutum
  unsure (1)..(375): unsure at all n locations; Clone ID: LIB3493-010-P1-M1-G6
cttttctttgctttccaaagcttttgctactctttcttttaactcttcaacctaggcagtgtttggttctaaaccatggaaattccggttatcaacaggataagcgatttcgaagctagcataagcactctaaacaacccatcttttctttcccaagtttatgccctttctgggattgataaaatctaccaagcttatcatttttggaaatggngggctttgattcttgccctactggcctccttatctaccataatcaatagcctcaagattctggttatcagattccgacgaaaccattctctaccatctcgacctcttctttatgacacagatattgatactgactcggagacttcattatgttcatcatcg

SEQ ID NO: 2971 - DNA, 455 bp, Gossypium hirsutum
  unsure (1)..(455): unsure at all n locations; Clone ID: LIB3493-010-P1-M1-G7
atgaaattgaaaaaagagagatagtattgtcagagacaatggtagttatgtctgatttgtttgtcaaagaagaaaaaaaaataattgttggtttcttctttatttttattatttttaatcacattcttggtttaaaatattaattggtgtagaaatatggaaatgataaactagaagcaaaaggcaaagggtaattgtcttttgtttttgttttttaaacccaacccacttatgattggcttaataagtctctttccttgagccccttttgtctttattattaatctttatattctctacttaaactatggntgaagatatgtatgatgtttagagggcttaaactaatggaaggtttttttcaaanttgaaccaancaaacatacacatgcatgcaacatcataactcttttatagagtgacctaaaatcaattcaaatgtccgtcattttaca

SEQ ID NO: 2972 - DNA, 251 bp, Gossypium hirsutum
  Clone ID: LIB3493-010-P1-M1-G8
cagaggatgaaaaagagtatcttatttaatggtagataatcataaaaactacataaagcaagttcttgaaaaccaccaaacccagtgacgataaaaacagcaccataaaagagtctaaatgacagacattaaatattctagacattggacaacatcccagcttaacacatagttctctttatctcctataagagagctgatcgcacccagcgacaaacatacgagtctaacttttaacatactctgacagg

SEQ ID NO: 2973 - DNA, 389 bp, Gossypium hirsutum
  Clone ID: LIB3493-010-P1-M1-G9
gaaaattgggtttacttatttatttggatcggattgggttggtttggttttagaaaagaaggaaggcgatgtcaaccccagcaaggaagaggctgatgagagacttcaagaggttacagcaggatccacctgctggtattagtggggctcctcaagataataatatcatgctttggaacgctgttatttttgggcctgacgatactccttgggatggaggcacgttcaagttgactttgcagtttacagaggattatccaaataagcctccaactgtccgtttcgtctcacgaatgtttcatccgaatatctatgcagatgggagcatttgtctggatattttacaaaaccactggagtcctatatatgatgttgcaactatactcacc

SEQ ID NO: 2974 - DNA, 395 bp, Gossypium hirsutum
  Clone ID: LIB3493-010-P1-M1-H1
gcgccaatgccttgatagtcaacctggcctagaaacttaccctgatattggtcaagctgctttcggtacttatggtagaatcgccctctctataattttatacgtggagttatatgcttgctgtgttgagtatataattttagagggtgataacttggcatctttattcccaaatgcatacgttagtttgggtggattggagttgagcccgcaacgtctgtttgctttgatggcaacccttgctgtgctccccactgtttggctcagagacctcagtgttcttagttatatttctgctggtggagtggtggcatcaatcttggcagtactttgcttattttggggtggtttgattgaccaagttgggttccacaacaaagggacaaccttaaaca

SEQ ID NO: 2975 - DNA, 271 bp, Gossypium hirsutum
  Clone ID: LIB3493-010-P1-M1-H10
cgaagctgccctcttcttctgttgctctgaacttattgtctctatttgaggagcaagttttgaggttgtggtctaaaaagcgaaaatggtgaagatctgttgcattggagctggttatgttggtgggcctacaatggctgtgattgcacttaaatgcccatctattgaagtggctgttgtggatatctctgtgcctcgtattaatgcatggaatagtgaccagcttccaatctatgagcctggtcttgatgctgttgtgaagcaatgtcgt

SEQ ID NO: 2976 - DNA, 287 bp, Gossypium hirsutum
  Clone ID: LIB3493-010-P1-M1-H11
gtttactggggttcgtcttggttggactgttgttccaaaacagcttctgttctcagatggattccctgttgccaaagacttcaaccgtatcatttgtacttgctttaacggtgcatctaatattgcccaagctggtggcttggcttgcctttcacccgaagggctcgaggccatgcaagaggtgatcggcttctataaagaaaacaccaaaattatagtagaaacattcaactcgcttgggtttaaagtatatggaggaaagaatgcacccatacgtgtgggttcac

SEQ ID NO: 2977 - DNA, 334 bp, Gossypium hirsutum
  Clone ID: LIB3493-010-P1-M1-H2
aggtaagtgggtgtatgacagctcctatcctctctacgattcatcagcctgtccattcatccacaaggagtttaattgcctcaagtatggccgccctgatcatctttaccttaaatatcgatggcaaccaagcaagtgtaatttgccaaggtttgatgggacgcatttgttgaggagattaaagggcaagaagataatgtttattggggactccataagtataaaccaatggcaatctctgttatgcatgcttcacgctgcagtgcctgctacatctggtataatcacacgagacttgcataatcacactgtttccactgttactttcaagcat

SEQ ID NO: 2978 - DNA, 338 bp, Gossypium hirsutum
  Clone ID: LIB3493-010-P1-M1-H3
gttggcccagcactccctcatgtcttgaggaatcgtgtactaaagttgtctcggcctaaactagaaagtcactttatcttggatgtcaatatattggatgggactgtaatggctccatctacaccatttacaaagatctggcgaatgcgcaacaatggtactctgccctggtatcgtgggatgcaacttgtctggattgggggagacaagttaacaaatgcaatctcggttgatatagacattcccgccgaaggtgtgcctcttgatggggacctggacatttgctgttgatttactgcaccagagttgcctgggtcggatgtttcttactggaggat

SEQ ID NO: 2979 - DNA, 373 bp, Gossypium hirsutum
  Clone ID: LIB3493-010-P1-M1-H4
ctggaaattgcctccagcaaagttcttgtttttattagctctcaactgcttctagttgcattcgtatttgggaacacctgcaagactgtatttgaagctattatattcttatttgttatgcacccattcgatgtgggtgacaggtgtgaaattgatggagttcagatggtagtggaggaaatgaacatcttgactactgttttcctaagatatgacaaccagaaggtcatatatcccgaacagtgtcctggctaccaaggccattcataactaccatcgtagcccagatatgggtgatgccgttgaattttgcattcatgtgaaaactcctgcagaaaagattgtctaatgaagcaaagaattaatggttaca

SEQ ID NO: 2980 - DNA, 296 bp, Gossypium hirsutum
  Clone ID: LIB3493-010-P1-M1-H5
tttcactgctctcccctaaatcgtctccaagaaagagatctccttacagctaccgtacacactcacacacacattcactgaatgggtcgagtcatccgagctcaacgtaagggtgctggttccgtcttcaaggcccacacccaccaccgcaagggtcctgctcgtttccgcagcctcgacttcggtgaacgaaatggctacctcaagggtgttgtcaccgatgtcatccacgaccctggtcgtggcgctcctttagcccgtgttgtcttccgtcaccctttccgttacaagaagca

SEQ ID NO: 2981 - DNA, 250 bp, Gossypium hirsutum
  Clone ID: LIB3493-010-P1-M1-H6
aaaacaaatcagatccctaatgttagggcttcaacttggagaccccgctgaaccaccatcaaacttggtggccgaccatgcgcagaagaaacacaagcagaggctagaggtaagtactccccttttttattcatttcatgccaaatataagagaaaagaaaggggaaaaaatattcaaaaaggaaaaaaagaagatcttgaaaactacaagaaagaaaactcgaaatcaacccttctttaattttttttt

SEQ ID NO: 2982 - DNA, 326 bp, Gossypium hirsutum
  Clone ID: LIB3493-010-P1-M1-H7
cgccgctttgatgttgctaggcagacccccaattgaagcactattgagcagcaacagaggcttcattcagatcgcatatcagtagccatggtgaagtattcgaaggaacccgataatcccaccaaatcctgcaaggcaaggggctctgatcttagggttcatttcaagaacacaagggagacagctttcgccattagaaagttgccattggtaaaggctaaaaggtatttggaggatgttattgcccacaagcaagccataccgttccgacgcttttggtgggggttggacgtacggacaagcaaagaacaggcatttaatggaca

SEQ ID NO: 2983 - DNA, 381 bp, Gossypium hirsutum
  Clone ID: LIB3493-010-P1-M1-H8
gtttgagaccttcaatgtacctgccatgtatgttgccatccaggcagttctttctttgtatgccagtggtcgtacaacaggtattgtgctggattccggtgatggtgtttctcacactgtgccaatctatgaagggtatgcccttcctcatgccatcctccgtctagaccttgctggtcgtgatctcactgattctctgatgaagattcttactgagagaggttatatgttcaccaccactgctgaacgggaaattgtccgtgacatgaaggagaagcttgcttatgttgccctggactatgagcaggaactggagactgccaagagcagctcttttgttgagaagaactatgaattggctgatggacaagttattactat

SEQ ID NO: 2984 - DNA, 283 bp, Gossypium hirsutum
  Clone ID: LIB3493-010-P1-M1-H9
cagaaaaaaagaatcaatggcttccagttcagctgcttcaatggctctgcccttagctggaactactcaaaacaggatgccaagttctgaggcattctttaagccactcccggtgaagccatggagatcaatgggcgctgttaaaagacccaacggaaggctccaagtcaaggctgcttcttcttcgttcaaggaaaaggcggtgacagggttgacagcagcggcgctgacgacatcgatgatgatcccagaggtggctcaagcggctgatggagtcacccca

SEQ ID NO: 2985 - DNA, 419 bp, Gossypium hirsutum
  Clone ID: LIB3493-011-P1-M1-A10
gcaaaaggctgaggatcatgaaaagctctgatgctattggactcgctccaagggccgtggaaaaatgccggaaccggaactagctagtttaatacatgatttttgctatccgaagcagttctttctgaagaaataagaggatgttggagcgggcaggagatcacagggtatcttctttcacatggtgctactttttatcttctatttgcatgggaatttatatcatgtacgcttgtttttatctactaaaattataaaaccatcaaggtctagtgttttagagtctctgaacgaatcgctgttcccaatccttttttaagcttgtaaaatgcattgtttcttgaactttcatcgtttgtgtgttttgtatgttgaaagacccccgacattatctgtaaacccctgactttgattgtatt

SEQ ID NO: 2986 - DNA, 466 bp, Gossypium hirsutum
  unsure (1)..(466): unsure at all n locations; Clone ID: LIB3493-011-P1-M1-A11
tggagtcaaggccccactgtttaagctttctctatgcagtcctaatcatttcagcctccattctcttcactcactctgatgccagactcatggttcatatatggaagaaggaccaaggctcaaacctccatgaaaagctaaaaacaacggatcgtatcggcttcgatggtgatccatatacccttgactcacctttctacctaccacattctgactcattatcaccactactttctcagcctgaccactctccttcatttaccccacaatcgcctttcaaccctctgccaccttcggcgagttacggcctaccaacacctncaccaccgagtaacatcatcaacagcccaccaacacctncaccaccgagtaacatcatccatagtccgccagcaaatccaccggaagcagcttctcccgagcatgggttcaatccacctagcattttcttaagtccacctcaaca

SEQ ID NO: 2987 - DNA, 458 bp, Gossypium hirsutum
  Clone ID: LIB3493-011-P1-M1-A12
gtgctcacaaggaacgagctcaaccgtcatcgaggaaaaaatttgggcttcttgagaaacacaaggattatgtcgtccgtgcgaaagcattccacaagaaggaagaaacgttacggaaactcaaggagaaagctgcattcagaaacccagatgaattttactttcagatgataaaaacaagaactgtggatggagttcataaacctgagagtcaggctaacaaatacactcaagaagaactcatgctaatgaagactcaagacataggatatatactacagaaattgcaaagtgaaaggaagaaaattgagaagctaactgcagtgttgcattctgttgataatcatccatctaacagacatatttactatgccgaggatagggagaagctagagaattacagtcacaagcttcagaaagcagagttactcccccttctggtgatatccctgatcata

SEQ ID NO: 2988 - DNA, 322 bp, Gossypium hirsutum
  Clone ID: LIB3493-011-P1-M1-A2
gccacgcgtccgggagatatagagtagcagcaatttgccatttctttgttgctaaaacgatacaatacatggacttgtggatggatgatcccctcaccgggaagcgcttcagctcgactgacgatgatgaagaagttctacagcaatgggatccaggatctttaatgtactccggttgggcagaaaatccatctggaatcagcaatgagattatccaaagccaggctaatggaagcacggtccaagcctctcaatccccaaacatttccaatgctcctgttttgagaaaatgccattctactttatctcaagctgaacgagc

SEQ ID NO: 2989 - DNA, 440 bp, Gossypium hirsutum
  Clone ID: LIB3493-011-P1-M1-A4
tggttgggaaaccttcaggttatggagggtgagtgaatcatgctttaacttgagagtgttcaacaagcagtttgtgggattaggaaatcaaggtgtacaagcagtttcagatacacctactgatacagaaacgtttgagattgtaaggaaagatgatgatcgtaaccgagttcgattcaaagcatcaaatggtttgttcctacaggcacaatcggagacactggtaactgcagattatgcagagtctagttgggatgatagcgatccatctgtgttcataatgacaatcgtaaacaccatacaaggtgaatttcaaatcactaatggttatggccctgataaagcccctcaagtcatgcaggatcattggaattcttacatcactgaggaggatttcaatttcatgtctgcaaatggactgagtgccgtgaggatacctg

SEQ ID NO: 2990 - DNA, 440 bp, Gossypium hirsutum
  Clone ID: LIB3493-011-P1-M1-A5
cttggtcccttacccaagaatacacttcatgctttcttcatacgctccagtcatctccgctgagaaggcttaccatgagcagctatcagttgctgaaatcaccaatagtgcctttgagccctcatctatgatggccaagtgtgatcctcgccatggcaagtatatggcttgctgtttgatgtaccgtggtgatgttgtgcccaaggatgtcaatgctgctgttgccaccatcaagaccaagagaactattcaattcgttgactggtgcccaactggattcaagtgtggtatcaactaccagccaccgactgtcgttcctggtggtgatcttgctaaggtccagagagccgtttgcatgatttccaactcaaccagcgttgcttgggtgttctcccgcattgaccacaagtttgatctcatgtatgcccagcgtgcctttg

SEQ ID NO: 2991 - DNA, 138 bp, Gossypium hirsutum
  Clone ID: LIB3493-011-P1-M1-A6
ctaactttgttgttaattgtgggtgtttggagagaaggatttgaaggaaggaaagtgtaagaagatggaggttttattctatttttcttgaatcaacttgtattagtaaaaaaataagacctaatctataatggacaa

SEQ ID NO: 2992 - DNA, 326 bp, Gossypium hirsutum
  Clone ID: LIB3493-011-P1-M1-A7
cggacgcgtgggtgctgaagcatgcgggataccagctgcccgggtgacaaagaaagaagatctaaaagcagcaatgcagaaaatgttggacactcctggaccttacttgttggatgtgattgtcccacatcaagaacatgtcctgcctatgatccccagtggaggggctttcaaagatgtgatcacagagggtgatggaagaacacaatattgacctcaatgagcatcaaatggtcttttttgggtaatgtatgtaatgaatgagggtgggttatgcgggcttagtttctgagttctggaacatagttgttctatgcttttaaaaa

SEQ ID NO: 2993 - DNA, 408 bp, Gossypium hirsutum
  Clone ID: LIB3493-011-P1-M1-A8
aagacatccaggggctcctcgagaggagttcattgcaggggtaaagtatctgtcagagattcaacatcggaatttggttactcttctaggctactgtcaagaaagtggatctcaaatgttgatatatgaatgtatacctaatggaagcatctgcaatcatctttatgataccggacgagaggctccaactagactagagttcaagcagaggttatcaatagctctgggggcttgctgaggtttatgccatttgcatagcctgcaacccccattaatgcataagaacttcaaaacagccaatgtcttggttgatgagaacttcactgctaaggttgcagatgcagggatagcaatgttacttgaaaggatagaagaagcaggttcatctcacagttctagcatcaatgt

SEQ ID NO: 2994 - DNA, 89 bp, Gossypium hirsutum
  Clone ID: LIB3493-011-P1-M1-A9
aaaccctaatcgtgaaattccttcatcaaagaactacgaatggcgtggaggaaccaataatctcgaaatctcatagaactacggattct

SEQ ID NO: 2995 - DNA, 239 bp, Gossypium hirsutum
  unsure (1)..(239): unsure at all n locations; Clone ID: LIB3493-011-P1-M1-B1
tgtttatttttctgtggttgcaacttgcgcataaaagctttggcctttcgctttgcctttggtattttcattctttgggggtaaataataaaaaaaaaaaaagggaaaaaaagaagggattaaagaaagtgaaatcctcttgttatgggttttaaggtggggttcgcttcaaatttgatttgttaagaataattgaaggaaaaaaaatgagagagatttcntggtttgactcaaacaat

SEQ ID NO: 2996 - DNA, 399 bp, Gossypium hirsutum
  Clone ID: LIB3493-011-P1-M1-B10
cggacgcgtgggctttttcttgtggtctccagagcttctctgttacatcgtttattttctctcaagaactgaagaaaaaatccgaatagattaaaacttaagaaagatcaaaagatgtttggaagagcacctaagaagagtaataacaccaggtactatgagattctgggtgtttcgaataacgcttcccaggatgatttgaagaaagcttataaaaaagccgccattaaaaaccatccagacaaaggcggtgatcctgaaaaatttaaagagttggcccaagcttatgaggtattgagcgatcctgagaaacgtgagatatatgatcagtatggtgaggatgcactcaaagaaggaatgggtggtggtgccggtgctcatgacccgtttgacatcttc

SEQ ID NO: 2997 - DNA, 359 bp, Gossypium hirsutum
  Clone ID: LIB3493-011-P1-M1-B11
gtccttggttggttcatttgaggagtcactattgtctggaaggttcttttctggaaaactcaatcagaggattgatggttttctagctgttctgagcataactggaggggccttctctccacaatctcagaaacttccgttttctgtaaccagtgtggatggagattgttttttactgtattatgcatccattgatctttcaaggaattcatcatcaaataagtgccgagatcagaagcagaaaagaggccttagcattgatgaatcgcagcctgtaagaagccggttgcgtattcctatgaaagggcgcatacaattggttcttagcaatccagagaaaacacctcttcacacttttc

SEQ ID NO: 2998 - DNA, 404 bp, Gossypium hirsutum
  Clone ID: LIB3493-011-P1-M1-B12
cccacgcgtccgctctgctcaaaaaaacaaccccttcctcttctcttgtcctttaaacgtaacaatttcatgatctagaaaatgggatttggggctttaagaagtatcgttcgaccactatgtcggactctcctatcccaggcttcccctgcttctggaactatgtcgactctcccctcttatttgtgcccaaaaccctgtttgaattcccttttgtgtgggtctatttaccgccaatctccatggatctcgatgtccaatcagttgcatagcttaactgatactcgtttcccaaagagaaggcctcaagacaagccacgccgaaaaagagccagcttgagaccacctggcagaggcaaagaagaggaaagctcaattgcaggaagcttatatgaagaagaaga

SEQ ID NO: 2999 - DNA, 500 bp, Gossypium hirsutum
  unsure (1)..(500): unsure at all n locations; Clone ID: LIB3493-011-P1-M1-B2
gggagatcagaaatggcatcaacgcccactctcaagcctctcgtttcctctctctactctgatcctacccgccactgcggttctttgctagaaaattatttcccaagaagttttcaggttaagaaggaattaagtttagagggaaagctaaagttgtccacaaagcaattcagattgaattgtttagggcacagagacatggatgttagtgcttcagttntggctgattctgttacagatgctcaattggatgtcaacgaggaagaccctagcatttcgactttattgatgaattttgatgagtaatttgatccttatggtgcaatgagtacacctctttaccaaacagctacatttaagcagccttcggcaactgaaaatgggccttatgattatactaggagtggaaaccctacgcgggatgtcctggaaaggctcttggcaaagcttgagaaggcagatcgagcattttgctttaccagtggaatggctgctttgtc

SEQ ID NO: 3000 - DNA, 492 bp, Gossypium hirsutum
  Clone ID: LIB3493-011-P1-M1-B4
aagtactctagtacaccaggagctcagtcagaggcagaaccgtgttgtatttgtcaggaagaatataatgatggagaaaatcttgggacactggaatgtggccacaacttccatgccgattgcattaaacaatggttggtgcgcaaaaacttgtgccccatttgtaaaacaactggtctgactaaatgagaagacgaagaaaaagtggcatccaagcttgtactcattaaaacttgatgccttcgaatgttttccataagcagccttttaagtgttcacaccgagataatccatggcaattctaattcaattgcctgagccatttttacttccaattatgtcaaacaaagcaaagcttctgggtggagtggataacacaaatgcttgaagcactgtgaacagaaaagctaatttctatgtttttttcattctatcattgcacttgcactattagtttttatgtatggaatcttcagcccattggcgacatag

SEQ ID NO: 3001 - DNA, 480 bp, Gossypium hirsutum
  Clone ID: LIB3493-011-P1-M1-B6
gagacatctgatcctgagaatggctgccaatttccattctttgaggaactacatgcagtattcaccgaaagagccaagactatgcagcgccgcctacttgaaccagaagcaggttccagttccacccaggcaaagaaaaaggtgaagagaacaaccacagaaagatcctcagatgaattctctgaaggcgaggacgaagatgaaagtgaagaagaaaagccggctcgaggcacttcacacaagaggaaaaaatctgacagtactgtagtggacaaatctcctagaccaaattctggcactcgtacaggcctccaggaaatgcttagagaattttttgatcagcaactaaggatggaaatgcagtggagggagatgatggagaagcgtgcccaggagagacagctgtttgagcaagaatggcagcagtggatggagaagctcgagagggaaagggtgattgtggaaaaggcttggagggag

SEQ ID NO: 3002 - DNA, 304 bp, Gossypium hirsutum
  Clone ID: LIB3493-011-P1-M1-B7
gtcgaaaaatggctaacatgcttggaaccgagcatgatttgaacttcaaagagaccgaactgtgtcttggtttgcccggtggaatcgctgttgttgctgcaggtaatgaaacggaaagttcttcttccccaaagactaatggcaagagaggcttctctgagactgttgatttgaagcttaatcttcaatccaaagaatctaccatggatctaaacaagaaccttgatgacaacggttctaaggaaaaatcaggttctgccaaagatcctgcaaaaccttctgccaaggcacaagtggtgggttg

SEQ ID NO: 3003 - DNA, 207 bp, Gossypium hirsutum
  Clone ID: LIB3493-011-P1-M1-B8
gaagatttgtcgccacccagaagcgagcttattattaaatgtagccgtgacaacaagaaaatcctggtggtctaccatgctcataaccatagatgggtgtccctaataattcttgactgcaatgtttaggtgtgcatcaacggtggttagtccatcctgcgatgcgatccctatgaacgtttccaatcccgagaatgggctgcctat

SEQ ID NO: 3004 - DNA, 444 bp, Gossypium hirsutum
  Clone ID: LIB3493-011-P1-M1-B9
gtcgagatgcaaggtataagaaaactgaggtttgtcagacttgcagtaagttgaaaaatgtgtgtcaagtctgccttttagatcttgaatatggattgccagttcaagttcgggatactgctctaagtataaactccaatgatgccattccaaagagtgatgttaatagagagtattttgccgaggagcatgacaggagggcgagagctggtctagattacgaatcctcatatggcaaggtacgtccaaacgacactattctgaagcttcagagaacaataccttactacaagagaaaccgagcacatatttgcagtatctatgtgcggggtgaatgtacaagaagtgctgagtgcccttataggcatgaaatgccggaagctggggagttgtcccagcaaaatataaaagaccgttactatggggtgaatgatccagtggcac

SEQ ID NO: 3005 - DNA, 254 bp, Gossypium hirsutum
  unsure (1)..(254): unsure at all n locations; Clone ID: LIB3493-011-P1-M1-C1
atcactacttggaaagctgtcgcctgagtccgtccggattccggtcgccacgctcggcggcgatngagacttngcagatgggttggacaactgctatccctggagatacaccataatcaggangacaatgcagtcatgctatcggcgtatctangcgtgtgttcggctcggtacagcgtatatctgtctaccatcgtgtcttctttatgaatttaaggcaacactaagattgtcgcgactggagacggcactat

SEQ ID NO: 3006 - DNA, 506 bp, Gossypium hirsutum
  Clone ID: LIB3493-011-P1-M1-C10
cggacgcgtgggtgcaaaagcagctcaaagtgccttgaacgggaaactggagattgttggtcgaaccattaaggtttcatctgttacagatcatgttgttacccaagatactacagcaaaatctgcagactttgatgatgatgagggcggtggcttggccttgaacgcacaatcaagagcgttgcttatgcagaaactggatcgctctggtattgcaacaagcattacgagctctcttggagtaccccttgttaatgggtctgctccaaatcaacaggcaacattaccagtcaatggccaaggggcatatccagcaccggttctacagccaatcatgtctactacagcccttgaacctattggacagcccagcgagtgtttgctgttgaagaatatgtttgatcctacaactgagacggaacctgattttgatttggatattaaagaggatgttgaagaagaatgcagcaaatatggcagggtgaagcatatttatgtggacaaaa

SEQ ID NO: 3007 - DNA, 171 bp, Gossypium hirsutum
  Clone ID: LIB3493-011-P1-M1-C11
tttggtttttagccaaatggagatcttaaaagataccctttggggttatgttttttagtttggttttggtttctcttgaaaagctaaatgataagaaactcaattcaacatgatgttttatgattattattgcataatttggatttggattttgagttgttaatctttggt

SEQ ID NO: 3008 - DNA, 500 bp, Gossypium hirsutum
  Clone ID: LIB3493-011-P1-M1-C12
cccacgcgtccggtttacaagtgtgggcaaataattccaaaagatacgccaaattgtatttgtgatttttgtaggaagttgtaggctccaaagtttgctgtaaaaattttttaattcggtctgtaatataatgctactaggatttagtgaagaatcctgtaatagtttataggcgctccgaacggtgaattccccagattgttcccccttccaaacttgacagtcagcatagttcatttcagcaagagggatctgtaatattctctgaacaacctcattctgaaagttcccactctccagcatagctctctatggagaagtcccttcgaagcccagatgctcttccaggtgagagaaggtagatttcctaacctagcctccataaaatttgactgcggatagtattttgccttcaaaaccttcgctaataatggaattggataattaatcaatcgacaaccttgatttgctaacaacacgatattaaattagcctaactt

SEQ ID NO: 3009 - DNA, 439 bp, Gossypium hirsutum
  unsure (1)..(439): unsure at all n locations; Clone ID: LIB3493-011-P1-M1-C2
ttgcaacgggtaattggcgtctgataatctttactgatgctatcaccttggagacctgatgcccttttcttgcgttacttttaaagcattatgtgctttgtcttttctaatttgaattgccttttggattcataattagcttgtcaagttgggttcaggttttatatcttatatttgagttatgattaagtgtatatctgtatattgactgcatattgattcaaagtgtcattgtactgcatgtgacatctcgtaacaactatttagccccagttttgtttaaggggacctgtaatactgaatggaaccttaaatgggtttgctgattttcttttttcctgagttctagtcttctccagtggattattaacggtgcataatataatgtcacctcttcagagngtgtggcgttacttttaataaaccttagtttgattta

SEQ ID NO: 3010 - DNA, 497 bp, Gossypium hirsutum
  unsure (1)..(497): unsure at all n locations; Clone ID: LIB3493-011-P1-M1-C3
cggacgcgtgggcacgcgccgcccttttccttgcccctactttctctcacgcgatgctgagtactctacatctgcggctgctgccgcttctgctccatcgcagcctcctcccgctaagaagggcggaaaaggtaagatcactgatgagttcactggtgctggagccatcggtcaggtctgtcaagtgatcggtgccgtcgtcgatgttagattcgatgaaggtttgcctccgattttgacggcgcttgaagtgatggaccactcgatccggcttgtgttgaagtggctcagcacttgggtgaaaacatggttaggaccattgctatggatggaacggagggactcgtcagagggcagccggttctcaacaccggatctcctatcactgtgcctgtcggtagagctactcttggcgtatcatanatgtcattggagagcctattgacgagaaaggcgaactcaaaaccgaccacttcttgcccattcacagagaagca

SEQ ID NO: 3011 - DNA, 501 bp, Gossypium hirsutum
  Clone ID: LIB3493-011-P1-M1-C4
gattgttctcctaggatcatacaccgtgacataaagtccagtaacattttacttgatagcaatttggaggctcgagtatcagactttggacttgccaaactgttagaggatgaagaaactcatattacaaccattgttgcaggaacatttggttatttggctccagagtacatggtaagcgggagagcaactgacaagacggatgtctatagttttggagtcttggtgcttgaagtcttaagtggaaagagacctactgatgcatcattcatcgaaaagggcctcaacatcgttggttggttaaatttcttgataacggagaataggcaacgagagattgtagattcaaattgtgtggggatgcaggcagaaagcctggatgccttgctctcagttgccatccagtgtgtgtgttcgaacccagaagatagacccagcatgcacagggtggggcagtgcttgaatccgggttatgaccccatacccgagtgatttttatga

SEQ ID NO: 3012 - DNA, 401 bp, Gossypium hirsutum
  Clone ID: LIB3493-011-P1-M1-C5
caagaattcccatctgggtttctctttaatctctctaatcttcttgttttcaattcccaaatcactctcagcccttgatcctgaacccgcagtttgggatatgcttcccaaatacggtctccctagtgggcttttacccagcacagtcaccgactatgtcctccacgaagatgggaggttcatcgtcacgttggacagcccttgctacgttcaattcgagtacttggtctactacgataagaccatcaccggaaaactgggttatggttccattactgatttgaaaggtattcaggtgaagcgattcttgttttggctcgatgtcgatgagatcaccgtcgatttgccaccttccggttctatctatttccaagttgggtttatcaacaagaagctcgacg

SEQ ID NO: 3013 - DNA, 394 bp, Gossypium hirsutum
  Clone ID: LIB3493-011-P1-M1-C6
cggacgcgtgggccagcacccaattcttatggtgggaattatccacctgctcctaatacatatggtgggaatgcaaattatggaatggattcagtccctccacctacaagctatactggtggacctacatcataccctccatcttatggtggccctgcgggtggctatgctggtgagggtttgagtgatgcacggactggtggtcgtggtggacctcctggtggatatgacggtgggtatggttctggtggtcctcgaaatcagggaggtggttatggtggtcctcctgttgaagctccagctaagatcaagcagtgtgacggcaactgtggggattcttgcgacaactcaagaatatacataacaaatttgccacctgatgttactattgaag

SEQ ID NO: 3014 - DNA, 208 bp, Gossypium hirsutum
  Clone ID: LIB3493-011-P1-M1-C7
gtcccttacaagggcagtattctacatgatcatgcaatgccttggtgctatctgtggagctggtgtagtgaaaggattcgaaggagacagtagatatgagatgttgggtggtggagccaatgttgtgaaccatggctacaccaaaggtgatggtcttggtgctgaaatcattggcacttttgatcttgctacactgtttctctgtact

SEQ ID NO: 3015 - DNA, 381 bp, Gossypium hirsutum
  Clone ID: LIB3493-011-P1-M1-C8
aacttatgttagcattgaatatgaagcttctgccatgtttgatctgcgaaacgttgtgatttatgtacctctcccagctcttcgggaggccccaaatgttaggcagattgatggtgaatggagatatgactccagaaattctgtcttagaatggtccatacttctcattgataactctaaccgcagtggatcaatggagtttgttgtgcctccagcagattcatctgtgttcttccccatttctgtccgtttttcagcaacgagtacatacagtgacctgaaggttgtgaacatcattcccctgagaggcggtggagctccttccccgaagttctcccagcgaacaaatttgattacagagaattatcaagttgtgtgatg

SEQ ID NO: 3016 - DNA, 107 bp, Gossypium hirsutum
  Clone ID: LIB3493-011-P1-M1-C9
gtgaggcagccgccggttcctttgaccaccaccaccgccacctgtgtgtgatcaacctcactctcttttcagataatccacaggttaaggggaatcaataagctgtg

SEQ ID NO: 3017 - DNA, 365 bp, Gossypium hirsutum
  unsure (1)..(365): unsure at all n locations; Clone ID: LIB3493-011-P1-M1-D1
cttgtttttcaccattaactaccctccactttcggataatacccacagtgcacctcaccatcaccaccgtcatagctttctttcaacttcactttttctccggttctttccctcgttggtggtgcggcgtgggagaaacaagtccgtcactcttctactccacgtagagttaatgggttttcccgttttgtcaccggcgcccctgggttcatcggttctcactgttcancttgcttgaaaaaacgcggcgatggggttttggattggataattttaacgattattacgatccttcgttgaaaaagggcgaggcagaatctgttaagcaagcaccaaattttcatcgtcgaaggggatttgaacga

SEQ ID NO: 3018 - DNA, 489 bp, Gossypium hirsutum
  Clone ID: LIB3493-011-P1-M1-D10
gctttatttgataacgaggaggtaggttcagattcatatcaaggtgcaggggcaccaactatgtttcaggcaatgagacgtattgctggttctttagccaacagttatgctgtatctgctgatatggcacatggagttcatccaaatttcatggataagcatgaagaacaccatcgaccagaaatgcataaaggtcttgtgatcaagcacaatgcaaatcagcggtatgctaccagtggagtaacagcttttctcttcaaagaagttgcaaagatgcataaccttcctactcaggaatttgtggtaagaaatgatatgggatgtggatccaccattggtcccatacttgcttcaggagttggtattcgtactgttgattgtggcattgcccagctctctatgcacagtgtgagagaagtatgtgggaaggaagatatagacattgcttacaaacatttcaaggcattttaccaaactttcttcagcata

SEQ ID NO: 3019 - DNA, 390 bp, Gossypium hirsutum
  Clone ID: LIB3493-011-P1-M1-D11
aaaaaagagagatggcgtctgtaataaaatctgcaatcttaattctgtcggtgtttttatctgtacgcttcagttcgggtgttaggttgctccaggaacagcccaatgatgaccccaaaaacatggacgctattcctcccattgatgcactcaaccctaccgagttgaatggacccggtgttggcattcacgaagatcatgttgtcccaaaaggtgctgaaattggtactcttggttttggttttgaaggtggtcctgataaatgttgttcttctggatgttccggtaattgtaatcctggtgggttcgttctaccatttcctcaaattccagaaatcccaagaattccagaaatcccacaaatcccacagatcccacaaatcccacaaa

SEQ ID NO: 3020 - DNA, 446 bp, Gossypium hirsutum
  Clone ID: LIB3493-011-P1-M1-D12
gcggcgcaaaaccaagctacctttcttcgtcctcatctgtgcaaagcctctgtttctagtgccgttctcttaatttgtttcttattgtttgctcattttcgttagtattagatcagagagagagagggtggagatctggacaggtctggctgtggccgaaatcaaagaagaatatttgagggaggaggagaaaacatcgaacaagattaaaccgaaacaaattaggaaaattctatggattggtggcataagatgatcttccctgttcgaagactctggtttggtgtttcttctcgcgttaaggctcgcaaaaatggagccgggttgttgaagcttcacgatgatgtacaaacatgtggatacgaagatgtgcaggtgatgtgggaaatgctgcgaagatcggaatcggagctgttggctgctaacaacaatcccaagcgcaagca

SEQ ID NO: 3021 - DNA, 511 bp, Gossypium hirsutum
  unsure (1)..(511): unsure at all n locations; Clone ID: LIB3493-011-P1-M1-D2
gggaaaaaaagattggcagtgtgtaataaggatctgaattcttgcaaaacatggcattagaggcagtggtttaccctccggatcgatttacttacggtttcaaggacatcttccctgttgctggtggaggaggaggagcctggggatatgatttttgctttcaagatgaagataaagttcttcctgtgatccttgaaaccaacttacaacaacaagggagtcatgcaaattgggactcatcgtctacttcagtcatgcaacaacaacatgcaaaggaattatgggatccttactcttcttcgcctgaaacttgtactgtcgaccagtctctccctggtcctgcagctggtttccaagctccaatggaacccccaccagcttacacggcgaccaacggtggtggtagacgaaaacgccgtcgcaccaagagcagttagaaccaagnaagagctagagaaccagagaatgactcataatgctggtgaacgcaatcgtcggaaacaaatgaatg

SEQ ID NO: 3022 - DNA, 380 bp, Gossypium hirsutum
  Clone ID: LIB3493-011-P1-M1-D3
gtcagccttaaactctctccttccaatgccgattcatcttcaccaggtggggttctttgcgtctggaggaatcttagcccgaaatccctcctcaacttcgatttcgacgaaaaaggaggagaaatccatgcctgctcgcacggaaggctccttgtcaccgtcttctatatttatacaatgggatgcccaacgagacgaacatgctaaagctaaggattggagaaaaagaatcacttgtattgatgtttttggcatctttttgtggcgtaatcggtttttgaaccggtaaaaagataaaaccttgctttatgccgaaagaagaaatcaaaaataaaatccattcttcgtatttccaattgtgctgtctggtggcttttttt

SEQ ID NO: 3023 - DNA, 436 bp, Gossypium hirsutum
  Clone ID: LIB3493-011-P1-M1-D4
cagtgcttgacgatgaaaactacaatatgagggtattggtggatcattcagtagtggaaagttttggaggaggagggaggacggtgataacatcaagagtgtatccaacggaagccatatatggagcagcacggctgttcttgttcaacaatgcaagtggagtgaatgtgaaggccacactcaaaatatgggagatgaattctgcctttattcgtcctttcccatttgaagaaacattattccaggaaatggttgcttccacatgattatcatttgggaagggtggatgcccccagtctacaaaacatattagtattatgttttcagtgcataattatttttatttgttgggcatgtccattcattttgtattgtcgcctggtatttggttgagaataaatcgataaaattttgagattcttatatgttaaatatt

SEQ ID NO: 3024 - DNA, 531 bp, Gossypium hirsutum
  Clone ID: LIB3493-011-P1-M1-D5
caataactctccccggtgaaggggaaataatggatatgatggaagttgctgatcctgatgctgttcatgctgttcgaaccttcattagaaaggagcttgcctcacaactaaaatcagagtttttaagcacagttgagaacaatagaagctcagaggagtatgtatttgaccatcctaatatgtccggacgtgccctcaagaatactgctcttgcatatcttggttcccttgaagatacagagataactgagcttgcactgcatgagtacaaaactgcaacaaatatgacagaccaatttgctgctttgtctgccatttcccagaaaccaggtaaaactcgtgatgacgttttggccgacttctataccaagtggcaacataactacctggttgtaaacaaatggtttgcccttcaagccatgtctaacattcccggtaacgtcgagaatgttcgcaaactcttaaatcatccagcatttgaccttcgtaatccaaacaaggtgtactcacttatcggaggattttgggatc

SEQ ID NO: 3025 - DNA, 445 bp, Gossypium hirsutum
  Clone ID: LIB3493-011-P1-M1-D6
atcttaataaacaatgctggcatcatgttttgtccctttcagctttctcaagatggaatagaggtgcagtttgcaactaatcatataggacatttcctcttaacaaaccttctactggacacaatgaagaacacagttaaagcaactgggatccaaggaaggattgtcaacttatcatcaatagctcaccactactgttataataaagggatccgatttcataagatcaatcacaaacaaggatacagtgagaaaagagcatatgggcagtccaaattagcaaatatattgcatgccaatgaactctctcgtcggttgcaggaggagggtgtgaacatcacagttaattcggttcacccgggattgattatgacgcctctgtttagacactccgctgatctgatgaaaactttgaagttcttcagtttctttctctggaagaacg

SEQ ID NO: 3026 - DNA, 425 bp, Gossypium hirsutum
  Clone ID: LIB3493-011-P1-M1-D7
ccatcgtctttcctaaccgttcaattgaacatcccctcttttctggtctttttgttttcccatccctttctctagaaaattttgacaccaattttctcgagaaagttagggtttttacaaagacagatatagagaaggagcaatcatgagctttcaagatctggaggctggacggtcatttgcgtcgaggcataacatgatcaacggaaagcaagacgcttcgcaagctgtggcttctggcattttccaaatcaacaccgacgtctccacattccagcgactcgtcaatacccttggcactcccaaggacacccctgagctccgagaaaaactgcataaaacaaggctacatattgggcaattagtgaaggacacttcggcttaacttaaacaagctagtgaaaccgatcaccatgctgaagttc

SEQ ID NO: 3027 - DNA, 249 bp, Gossypium hirsutum
  Clone ID: LIB3493-011-P1-M1-D8
cggacgcgtgggcggacgcgtgggtgagccgcttacaagacgcattggtctgggcagggtttgatgggatcagcagatacatattgagatggcgcatcaagatggaactgtttgaaggtactctctagaatgtgtttaagagctgtgacagagcactgctcttgtggctacaaatggctggaatagttaagcagatgctgaacaactaagatctcctggttaatcaatagatttatctgacctagcaca

SEQ ID NO: 3028 - DNA, 399 bp, Gossypium hirsutum
  unsure (1)..(399): unsure at all n locations; Clone ID: LIB3493-011-P1-M1-D9
gaaacctcattacttgacccagatgagggaattcgctttaggggcttgtcaattcccgaatgtcaaaaactattaccagctgcaaagcctgatggagagcctttacctgagggtcttttatggcttcttttgactggaaagatgccaagcaaagctcaggttgatgctttatctcangaattgcgtgaccgtgctgttgttccagattacgttttcaaggccattgatgctctacctgtttcaactcatccaatgactcaatttgcaactggtgttatggcactccaagttcaaagtgaatttcaaaaagcatatgagaaaaggatttcaaagttaaagtattgggagccgacatatgaagatgctcttagtttgatagctcgtgtgccattggtagct

SEQ ID NO: 3029 - DNA, 441 bp, Gossypium hirsutum
  Clone ID: LIB3493-011-P1-M1-E1
cggacgcgtgggggttaatctcagcggttgtgtgaatttgagcgacaaagttgttcaaacgatctccaacttgcatgggtggactctagaactgctgaatctcgatggttgcaagatcagcgacgctagtttagttgcaattgccaaaaactgtcagttgctaactgatctcgatatctccaagtgcaccatcaccgattctggaatcgcagctctggcttatttcaatccgattaatctgcagatcctttcggtatctgggtgctctatggtttcagacaaaagcttgccttcacttggaaaactgggtgagaccctcttggggtaaacctacagcaatgcaaagcaatcagcagccgtgccgtggagctacttacggagcagctatggagggtgatatccttttctaaactaaagcatacaaactccccatacatagat

SEQ ID NO: 3030 - DNA, 437 bp, Gossypium hirsutum
  Clone ID: LIB3493-011-P1-M1-E10
caaagatattgttaaaattggtcgcactcacactcaagatgcaacacctttgactcttggtcaagagttcagtggctatactacacaagtcaagtatggaattgatcgagttttgtgcacccttccacgcatgtatcagctagcacaaagtggtactgccgttgggacaggattgaacacaaagaaagggtttgatgcaaaaattgctgcggctgtagcagatgagacaaacttgccatttgtcacagcagaaaataagtttgaagctttggctgcacatgatgcctttgttgaaactagcggagccctaaacactgttgctacatccctgatgaaggttgcaaatgacatacgcttactgggaagtggtccccgatgtggccttggtgagctcattcttcctgaaaacgagccaggcagcagtataatgcctggga

SEQ ID NO: 3031 - DNA, 516 bp, Gossypium hirsutum
  Clone ID: LIB3493-011-P1-M1-E11
ttttgttaataaagaagtgaaaatgctttcggattcattgctgattttcttagccagctcagttctgtgggcaacacaaggggtagtcattcatgcagctggtggtagctcagaatactatgaaccagatcccttcacatgcaaccgttatccagactttcctaacgcaacacagtcaccggtgccgccacctcagtttccgttctttcctcttaccaatggatctccaccttttgcaatgctttccacttattctgctgagcctactgaaattcagtcatgtgagtcacagttgcagtctgttgaagcttgcttccaagaccttgtcaatgtgtttttgactaacgagctgaacgttggaccagcatgttgcaaatcaataacagcgatcaaacaaggttgcttggatagcttatttccacccttcgttgttgacttatttggcctttacatcaaggaaacttgttctgctgcttcatctcttgcacttttttcctaggattttttatctctagg

SEQ ID NO: 3032 - DNA, 331 bp, Gossypium hirsutum
  Clone ID: LIB3493-011-P1-M1-E12
cgaagtgatgctgaaattgaagctgctttgcaagccggagataagcttcctcgtgtcaatcaagatacacgcttgaactttagggttcttgatattaggacccctgctaatcaaggaattttccgcatccagtgccaagttggaactatatttaggcaattcttgctgtctgagggttttgttgaaatccacacccctaagctgatagctggctctagtgaaggtggttctgctgtttttaagctagactacaaagggcaacctgcgtgtctggcacagtcccctcaacttcacaagcagatggcgatatgtggggactttggacgggttt

SEQ ID NO: 3033 - DNA, 261 bp, Gossypium hirsutum
  Clone ID: LIB3493-011-P1-M1-E2
tacatttctcgcattctccatctctgtctttactttctttggttttttcttgcatcatcaaaccttgttctcttctgctctttttacgataatcaaatttcctaaaaagaatcaatccgtgcgggtttagtttaactcttttgcagagttgattttcgattgttcagatggctgccatcgctcggtatcgtttctcggacctgacgagacaattccctaacacgagcggtgctcgccctctcaagtcacaaccaccccatg

SEQ ID NO: 3034 - DNA, 99 bp, Gossypium hirsutum
  Clone ID: LIB3493-011-P1-M1-E3
cattttgcttttcaacacaattttaaatcccaaagtttctctctacctttaaaactctataattttctctttgttttctgggaatccttgatcaaatcg

SEQ ID NO: 3035 - DNA, 208 bp, Gossypium hirsutum
  Clone ID: LIB3493-011-P1-M1-E4
caagagagatggcgtctgtaataaaatctgcaatcttaattctgtcggtgtttttatctgtacgcttcagttcgggtgttaggttgctccaggaacagcccaatgatgaccccaaaaacatggacgctattcctcccattgatgcactcaaccctaccgagttgaatggacccggtgttggcattcacgaagatcatgttgtcccaaa

SEQ ID NO: 3036 - DNA, 365 bp, Gossypium hirsutum
  Clone ID: LIB3493-011-P1-M1-E5
ccaagggtttctggtagtgatctatgtctgctgaatcttcctaatggcctgtaacgatgaaaacgagcctttgctatcaggattagcgactccaagaactcaaaagactaatggggatagaccaaagaagagaaggtttcgacgtgttaggagtgctccttttgcagattttgttccgactgatggtaatagagaagctgcagttccacgttccgggtccattttcgggagacttaatccgagtcttaagaaggtagctctatttttgacgttatacatgggtttaggcaccatttgcttttatacaaccaggacccaaatcaaaggggacaaaacaaatggaattcttgatgctctttattttt

SEQ ID NO: 3037 - DNA, 461 bp, Gossypium hirsutum
  Clone ID: LIB3493-011-P1-M1-E6
gcagaaaccaaagatgcaaaaagcttcacttctttgttcttcgaatccaatatcttcaccgccagcctatcttcacacatgttgtccactcacagctcccatcagaacccgtttctctccttctctctttgctttctcttctctccgcttctcattgaatcgtctccacggtcggcgccatggcttttctcctttgcacagcactgctactgaagaaatgattgaagctagcaagaacgtttctagttttgttgaaattgggtacatatccagtgttcatgggctacaaggagaaatttgtataaaacccaacactgattttcctgaactgcggttttgcaaggctgggagaagatggttaaagcaacaagtttcaggtaaagaaaccaataaagaagtagagcttgttgaagggagggaacatcctggaaagaaggagtggatactcagcttcagtggga

SEQ ID NO: 3038 - DNA, 299 bp, Gossypium hirsutum
  Clone ID: LIB3493-011-P1-M1-E7
ctttaatgggtatcagttaatttctttggaattctggttggaactccttttctttttctttttctttttttgtttttaacatgtttgggcaagaagaaaaaaaccggcttgccgggactgctgctgacgccgcccggcaaccatatctacggtcaatttcttggaccgaccgttcaccaactaagccgaacccaaaaccgcctacgaacacaaaaaggagatcacgtttgcctcctctttgtataaaaagaaggccggtggaagagtggccgaacgcttgctctgatgaccttggtgtc

SEQ ID NO: 3039 - DNA, 269 bp, Gossypium hirsutum
  Clone ID: LIB3493-011-P1-M1-E8
cgttattttgccgtcgtattttttttccagagatttgttcttttcgcttctttcgttatggggaagatcaagatcggaatcaacggatttggaaggatcgggcgtttggttgccagagttgctctccaaagtgaagatgttgagctcgttgctgttaacgatcctttcatcaccaccgattacatgacctacatgtttaagtatgacagtgttcacggtcaatggaagcaccatgagcttaaggtgaaggactcaaaaacccttctctt

SEQ ID NO: 3040 - DNA, 427 bp, Gossypium hirsutum
  Clone ID: LIB3493-011-P1-M1-E9
gccgaccctctggtgccattccagtgtattccaggagcttctggagctcttggctgctgaaattctttttttaggttcttttgggtttgggcccttttgcaaatcgggctaggaatattggtccttggtcctcagtatacgtttaggctattcgggcattgcgccaaatgtaattgggttgaatttgtgttttttattttttgggctagtttggtgtttattgaaaggttgtaagtggactgtttgggctacttcaattttagactttattcggctttttattttaatttatttttggtttcgtttattatttgggttttctctagtaagccccggcaaaatgggccacatacattatttatatttgttttgcctattaattaatctattgggtttaattaactgtttaaatattcgaatacgctat

SEQ ID NO: 3041 - DNA, 337 bp, Gossypium hirsutum
  Clone ID: LIB3493-011-P1-M1-F1
ctttagccctccccctacatgtgataacgggcctttgactcaattcgagaaagcaaatgctgttgcaaaggcacaggaagcattaaccagagatggttttatggtggttatgaagcctacacatgtatggagacggttttacatggcaatccctgttgcctggacggctaaacatcacttaaaagaaaacacagatatcattctacgcattaacaagcgtacatggaggaccagatataattatcacaaaaatcgtgattgtggagggctttctggtggttggaagtgtttgtgaatgacaataatttaatagaacatgatgtgtgtgtatttgagc

SEQ ID NO: 3042 - DNA, 516 bp, Gossypium hirsutum
  Clone ID: LIB3493-011-P1-M1-F10
ggaggtctcaatcaaatgcgagcggcaatttgtgacatggttaccattgcaagatatttgaatgtcacgcttatagtcccggagctggataaaacatccttctgggccgatcccagtgaatttcaagatatatttgatgtgaatcatttcattacatcactgagggatgaggttcgaatattgaaggagttgcctcctaggcttaagaggagagtggaaatggggtttgtgtattcaatgccaccaattagctggtcagatatatcctactatcataatcagattcttcctctgatacagaagtataaagttatacatttgaatagaactgacgctcgacttgccaacaacgggcagtctttagatgttcagaagctgcgatgtcgtgtaaattttaatgctttaagattcactcctcagatagaagaagtgggtaaacgagttattaagcttctgaggcaaaatggtcctttcatagtacttcaccttagatatgaaatggacatgttagcattt

SEQ ID NO: 3043 - DNA, 424 bp, Gossypium hirsutum
  Clone ID: LIB3493-011-P1-M1-F11
atcaccttcccgtgtagttttgtctggtggaatatgtcctattaccaagaagatgatgctgaatacatagcagaagagtatgacatggaggacatagatgacatggatgaagagttctgcggcagagatatgtctggctcggagtctgatgttgatgaatttgattactcgaataataaaatatctgatacttctgctgctgaagctagaagaggaaaagacatccagggaataccttgggatcagctcagcatcactagggaaaaatacaggcaaactaggctagaacagtacaagaactatgagaatatcccccactctggggaagtgtcagggaaggattgcaagattaccaagaaaggtgcctcatactatgacttcaggctaaattcaagatctgtgaaatcaacaatacttcattttc

SEQ ID NO: 3044 - DNA, 198 bp, Gossypium hirsutum
  Clone ID: LIB3493-011-P1-M1-F12
gcaactgctgcagatggaaatgactctgtatttcctgttgcttttgcttttgtagatgcagaaaccaatgataattggcattggtttttatcacaactaaaatcagctctgtcaacatcttgtcctctaacatttgttgcagacagacagaagggtttgcgggagtcaatctctgaaattttcaaggattcctatcat

SEQ ID NO: 3045 - DNA, 364 bp, Gossypium hirsutum
  Clone ID: LIB3493-011-P1-M1-F2
gatttaatggaggtttcccgtcaaatttgaaggtggatgtaacggtgtgtaaaaaccatagaaagtgttacaagacggtgcaagaggccgtagatgctgcacctaaaaacaaaaaggggagggatcaatatgtgataaaaataaggaaaggggtgtacgaagaaacggttagggtcccgtttgagaagaaaaatgtggtgtttttgggggaagggatgggcaaaaccattattaccggcgctttaaatgttcaccagcctggaatgaatacttataattctgctacagtcggagtacttggggatggttttatggcgagcgggctgacaatcaggaacacagcaggctccgatgcccaccaagc

SEQ ID NO: 3046 - DNA, 60 bp, Gossypium hirsutum
  Clone ID: LIB3493-011-P1-M1-F3
ggacctgggatggtgaactgatgaatttgtgacagaaaagtgatgttgattttgctcgct

SEQ ID NO: 3047 - DNA, 96 bp, Gossypium hirsutum
  Clone ID: LIB3493-011-P1-M1-F4
tcggaacagatctcaaactttctctacaatcacttgtttttgattcgataaaggaaagagaaaaacgaaaacaaggaggaagttaaatattaagtt

SEQ ID NO: 3048 - DNA, 267 bp, Gossypium hirsutum
  unsure (1)..(267): unsure at all n locations; Clone ID: LIB3493-011-P1-M1-F5
gatgaattggccactgtcattgagatgtgcaagacaacagatcagaatagagctctttatccaaattggactttgtgcaactatcttgcagaagttgcaatgcaagcggataacagcaagctagcattttatgccttggaatttatggccaaatggattgctcggngtgaaaatgcaaggccgcctttcttgctttctgtagatcaaggattaattgtctcagcacttgcaactgcgggtaggacatacagttcaaaactgttggat

SEQ ID NO: 3049 - DNA, 460 bp, Gossypium hirsutum
  unsure (1)..(460): unsure at all n locations; Clone ID: LIB3493-011-P1-M1-F6
gaaaatccatgtcagcaaactccatcgccgccaccaccatctccaccgtcgcctaaaccatcttcaccaccacctacagttcctaaccccaactactgcccaccccctccttctccacccacctgcagcggtggtggaaactactactactctccaccaccaccttctcaatccagcggcggaaataactactacgctccaccaccacccggtggtgtcattggtggcatgtactacccttcaccaacgtacaaaaactacccaacgccaccaccacccaaccctatcgtgccttactttcctttntactaccatactccgccaccaccggcagaggcgagaagcttatcatcaacagtccattggctttctattattatttccatgttgnggtntttccttttcttcttttaaatataaaaaaaatgtaattaaagaagaaaagatggtgaaaataaat

SEQ ID NO: 3050 - DNA, 339 bp, Gossypium hirsutum
  Clone ID: LIB3493-011-P1-M1-F7
gaaagaagcccttactgtatcgactgcgacgatgtggatatcatgggcggcagcttttgcggcacctgcaattacggatgcccttaccgcaggttcaataatgggtgtggtggtggtgtcgcttatatggatgaactcaaacgaacgattaaggaccttaccatgaaacttgatgccaatggtcttttagggaaaaagaaggccatgaatatacaagctatggcgccagaatcttcatagatttatatatagattatagaaactacggattctatacaaagagaaagaaaatgaagaataaccaagcagcctgatatatgattgaattacaatgtgcta

SEQ ID NO: 3051 - DNA, 392 bp, Gossypium hirsutum
  Clone ID: LIB3493-011-P1-M1-F8
ctggaccacagggtccgtactactgtggtgtaggtgctgacaagtcctttggtagggacatcgtggactcccactacaaggcttgcctttatgctggcgttaatatcagtggaatcaacggtgaagttatgcctggtcaatgggaattccaagttggtccatctgttggaatatctgcaggtgatcaaatatggattgcacgatacatactcgagcgaatcactgaaatcgcaggagttgttctttcttttgatcccaaacccattccgggtgactggaatggtgctggtgctcatactaattacagcacaaagtcaatgagaaatgatggtggcatcaatgttatcaagaaggcgattggaaagttgggtctgcgccacaaggagcatatt

SEQ ID NO: 3052 - DNA, 458 bp, Gossypium hirsutum
  unsure (1)..(458): unsure at all n locations; Clone ID: LIB3493-011-P1-M1-F9
cggacgcgtgggctcgaatcaaaacttggccaggcgaatctcctgggatagtatcagatgtacattttgaggatattatcgtgaacaatgtctcttcccctatcctaattgatcaaaaatattgcccatggagtaaatgcaagataaatgaagaatcgaaagttaaactaagcaacattagcttcaagaacatccgtggcacatctgcgcttccagaagctgtcaagtttatttgcagcggttcttcgccatgtcaaaatgtggaacttgcagacattgatattaagcacaccggacctgaacccgcaacatcccaatgtttgaatgtcaagcctaaaactagtggcaaattaaacccgactccatgttccagccctgtcccaaaaaccctaagtgccaccgcttaaaccataccaacagattcaatgcaattgtnattaatatatttattcatatta

SEQ ID NO: 3053 - DNA, 401 bp, Gossypium hirsutum
  unsure (1)..(401): unsure at all n locations; Clone ID: LIB3493-011-P1-M1-G1
cggacgcgtggggccggcagaagcagagagcctacgcttaaatctcaagcaatgacattcaagcgtaggaatggtggccgcaacaagcacggccgtggccacgtcaagttcatccgctgctctaactgtggaaaatgctgtcccaaggataagtcgatcaagagatttcttgtgaggaacattgtggagcaagctgctgtcagagatgtccaggaagcttgcgtctatgacacctacactctgcctaagctgtacgtgaagatgcaatactgtgtttcgtgtgcgatccactctcatgttgtgagggtacgatcccgtaccaacaggagggaccgtgaccctcctcagcgcttcattagacgcanggatgacatgccaaagcctggacagcctggtcaagc

SEQ ID NO: 3054 - DNA, 152 bp, Gossypium hirsutum
  Clone ID: LIB3493-011-P1-M1-G10
ggtgtcacctcactttatattggatggggactcgatggttcagtttggatagcatcagaattgaaaggattaaatgatgactgcgaacatttcgaaagctttcctcccggtcatttatactcgagtaaatctggaggctttaggagatggta

SEQ ID NO: 3055 - DNA, 254 bp, Gossypium hirsutum
  unsure (1)..(254): unsure at all n locations; Clone ID: LIB3493-011-P1-M1-G11
tacaaacatgggccatacccaagtacggaatacactaccgcttgaaatggcaaaaggaatccgtcaataacatgattgaggaagctgtattagaggctgaggaaaaaggtgctagtgtgttgagtctaggcctcatgaatcagggtgaagagctaaacaggtacggtgaggtctatgtgaagaagcatcctcagttgaaagtgaagttagtggatgggagtagcttggcagtngcagttcttctaaatagcata

SEQ ID NO: 3056 - DNA, 243 bp, Gossypium hirsutum
  Clone ID: LIB3493-011-P1-M1-G12
gaaaagcccagaaaaaatctgaaagagagcatgagctaaaagctcaatttgagcaaactatgaaggaagctgcagataaatctcagggtgcaaatttatacattaaaaacttagatgatagtattggtgatgaaacattgaaggaacttttttcagagtttggtaacattacttcttgcaaggttatgcgtgaccctaatggaattagtaaggggctctgggttggtgcatttcccactctga

SEQ ID NO: 3057 - DNA, 489 bp, Gossypium hirsutum
  Clone ID: LIB3493-011-P1-M1-G2
ctgcatcttagataagtaagagaaaagatcagatttttctattttaaatagggattttttttgcgtgtgtggtttttgagaggatccatggctgcaccaccggcaagagctcgggctgattatgattacctcattaagcttcttttgattggcgatagtggtgtggggaagagttgtctgcttttacgtttttctgatggttcctttactactagtttcataacaactatcggcattgattttaagataagaaccattgagcttgatggtaagagggtcaaattgcaaatctgggatacagctggtcaagagcgatttcgaactattacaacagcttactaccgtggagcccatgggattttgctggtttatgatgttactgatgagtcatctttcaacaatattcggaattggattcgcaatattgaacaacatgcttcagacaatgtcaacaagatactggttggaaataaggctgacatggatgag

SEQ ID NO: 3058 - DNA, 58 bp, Gossypium hirsutum
  Clone ID: LIB3493-011-P1-M1-G4
gctagtattagtgttgctgtttggatgagatatatggaaatattggagttgtaatgaa

SEQ ID NO: 3059 - DNA, 119 bp, Gossypium hirsutum
  Clone ID: LIB3493-011-P1-M1-G5
aggacgcgtgggcaaaggcctaccgatcgtcactcttgctcattagctttcgatcttcattgccatttgctgagtcctagtgatacgaaccctagattcattcggagtctttagtgata

SEQ ID NO: 3060 - DNA, 261 bp, Gossypium hirsutum
  unsure (1)..(261): unsure at all n locations; Clone ID: LIB3493-011-P1-M1-G6
cggacgcgtgggtttttactttcctaaaagaagatggggatcaaacgttccctcctcctcatctccatcttctccctcgtggctatctcagcttgtgctagacctccttcagacattactgatacgcccgagtcacccgattccacacccgaatcacctgatntcacacccgaggcacctgatgatgactattcacctaatgcaccagatgaagcagcagacggttatgcacctccacctgaagcaccaaccccatctaca

SEQ ID NO: 3061 - DNA, 172 bp, Gossypium hirsutum
  Clone ID: LIB3493-011-P1-M1-G7
gaaataagaaagttagctcgatccctcccctccccacccctaccacatttgtatatatatatatatatatagtctgtttgaaaatctatggaattgaagcaaatggcgccatcgatacacatcttatggctcctttcaattcaatttttggtgttggttaatgggggcaaaa

SEQ ID NO: 3062 - DNA, 458 bp, Gossypium hirsutum
  Clone ID: LIB3493-011-P1-M1-G8
ggagaatagctgtaaccgtgggggatactgtaactttatgcatgtcaaggtaattggaagggagctgagaaggaagctgtttgggaggcaccgcaggtatagagggagtcggagcaggagtaggagcgccagtcctcgccaccggcgtgagagggaatatagggaaaagtctcgagatcgagaccgagatgatcatcgtgatagaaatgggcgaagaccggatagggatagggataggtatgaccgtgaaagcgggagtaggagaaagcatgggagtcctaggcgaagcagaagccctccacctgctaaggaaggaagtgaggagcggagagccaggattgaacaatggaaccgtgagagggaagagaaggtgtaagaaaagattgttgggtatcatgtgtttacttctgggtaatcatttctaattatcaagtttttgtatgtttctgcaatttgga

SEQ ID NO: 3063 - DNA, 435 bp, Gossypium hirsutum
  Clone ID: LIB3493-011-P1-M1-G9
tataagccgtagaagagggctctctcttggttgagcttattccccccattatttcctttactactccttttccaaatcttttcaggttgtatttttcagatctaatcctattttcccctcgcttttgcttctctttcatcttttctaatttttttttgggcggtggatagatggatcgttaccagagggtggagaagccgaaagcagagacacccattgacgagaatgagattcggattaccagtcaaggaaggatgcgtagttatatcacttatgccatgactctgctccaggagaagggatcgagtcaagtagtttttaaggcaatgggaagggccattaacaagactgtgaccattgtggagttaattaagagaagaatcgttggtttacatcagattacatcaattggatccatggatataacagatatgt

SEQ ID NO: 3064 - DNA, 98 bp, Gossypium hirsutum
  Clone ID: LIB3493-011-P1-M1-H1
aagaaccatggggtttcagaatccaccatcaacaacatgctgcgtttagctagagatttcttttatttaccggagagtgagcggttgaaagaattact

SEQ ID NO: 3065 - DNA, 205 bp, Gossypium hirsutum
  Clone ID: LIB3493-011-P1-M1-H10
cggacgcgtgggaaaaatggagggttcctcgtctgacaagctgatcgttgtgacccgtgaacctgatgggatcgctactgttaccatcaatcgacccaaatctctcaactccttgacccgacccatgatggtggacttggccaaggctttcaaggctcttgcgaaggacaactcggtgcgggtcatcatcttgtctggagctgga

SEQ ID NO: 3066 - DNA, 233 bp, Gossypium hirsutum
  Clone ID: LIB3493-011-P1-M1-H11
tacaaagagatcaacaccaatggatggacagctcttccttataaagcatcttctgatattaagggaacagatagcaccatttgacatagaattttccgttacatacaaagaacttgatttctctcatgtgctggagcatctgcgacggatacttagaggtcaggcttcattatttgactggactagatcaacatcattagcaaggaccttatctccccgtgttttggaaagtc

SEQ ID NO: 3067 - DNA, 345 bp, Gossypium hirsutum
  Clone ID: LIB3493-011-P1-M1-H2
atcgaagatgagatggcaaggactcaaaagaacaaagcaacagctcatcatctgggcttgctcaaggccaaacttgcaaagctactaagagaactccttacaccttcatcaaaaggaggaggtggcgcaagtgaaggctttgatgttaccaaaagtggagatgcaagagttggtctagtacgttctacttctgtggggaaatctacgcttcttaacaagttgacaggaacattttcagaggttgcttcctatgaatttactacattgacttgtatcccatgtgtgatcatgtatagaggggctaaaatccagttgttggatctttcgggtattatccagggtgct

SEQ ID NO: 3068 - DNA, 368 bp, Gossypium hirsutum
  unsure (1)..(368): unsure at all n locations; Clone ID: LIB3493-011-P1-M1-H3
atttacattgaactttactacatattcgccagtgtttggggccacaggatctatactatatacagcatcttgtttattgtattcataatccttctgattgtcacagcttttataactgtggctttgacatatttccaacttgctgctgaagatcatgaaatgggggtgaggtctttcctctgtggtggatcaactggtctctttatctatgcctactgcttgtattattactatgcacgatcagatatgtctggttntatgcaaacctcgttcttctttggttacatggcatgcatctgctacggattcttcctcttgctggggacaaggggtttccgtgcctcgctattctttgggcgtcacatata

SEQ ID NO: 3069 - DNA, 302 bp, Gossypium hirsutum
  Clone ID: LIB3493-011-P1-M1-H4
cggacgcgtgggtttggctacccgcttgttactcactcttcttctcatctccttttactctcaaaatttgcccccgaatttcccatttccagcaacacaagtcaatagacctacactaatcacacttctttttccttttcatttcactgcactgaattcacccaccatagctactcctttttattttttgcactgaattcactttcccactcttcgatttagagctttcaatcaaaattacgtaaataaaaagcccaaattcgatcactaatttaaagaaaaatttaattattgcttaaaaa

SEQ ID NO: 3070 - DNA, 252 bp, Gossypium hirsutum
  Clone ID: LIB3493-011-P1-M1-H5
atatgctgatttaaacttctcggatcatcaatgactacagaactcattcgtacgtatgttttgcatcatatcagtgtatgtagcctagtcgatttagacaaaaaattattacggtaatgctaatttgattggaaccttaagagggtgctttaggggctgattggaaacactttaactcgataaatattgtattttaatttaggttcaatttaagtctaaaggaggaaatcgcaggttggtaagtagtgctac

SEQ ID NO: 3071 - DNA, 420 bp, Gossypium hirsutum
  Clone ID: LIB3493-011-P1-M1-H7
cccacgcgtccgcttttaagtttgagattggaagtgaaactaaaataactgagttaatatggcggttcaagttccgagtcgacaattatttatcgatggcgagtggagagagcccatcctcaagaagcgactcccaatcatcaatcctgctactgaagagatcatcggtaacattccagcagctacagctgaagacgtggagcttgcggtggcggctgctcggagagctctttctagaaacaaaggcaaggattgggctaccgctcctggcgctgtccgtgccaagtatttacgtgccatcgctgctaaagtaacagagagaaaaactgagttggctaagcttgaagcaattgattgtgggaaacctcttgatgaagcgtttgggacattgaagatgttgctggatgttgagactatgca

SEQ ID NO: 3072 - DNA, 386 bp, Gossypium hirsutum
  Clone ID: LIB3493-011-P1-M1-H8
ctcaaccctagtgcaccttctggtggtagtccttagcctggtcgcatttgggtttgccattgcagccgagagaagaagaagcgttggcactgttgttaaagatgacataacaaattctacatattgtgtctacaactcggatgttgccactggctatggagtaggtgctttcttgtttcttctttctggcgaatcgctgttgatgggagttacaaagtgcatgtgttttgggaggccattagcaccgggtagtgatcgagcttggtctatcatatattttgtctcatcatggttgactttcttggttgcagaagcatgtctaatagcgggtgcaactaggaatgcttatcacaccaagtatcgtggaatgatttatgcccagaatt

SEQ ID NO: 3073 - DNA, 367 bp, Gossypium hirsutum
  Clone ID: LIB3493-011-P1-M1-H9
ctgatggtaatcttcatgttgctttgctcccaagctcaggcatgggtcatctgctaccttaccttagacttgctgcctcactcatccaccaccaatgttcactcactttaatcaccactcaccctattgtttcttcagctgaatctcagctcatctccactttcctctccgctttcccacaaatcactcaaaagaagttcacacccatccctctagatcccgtggctgctaacatcactgacccttttcaaatccaatgggaaaccattcgccaatcagctcacctgctttcccctctcatttcttcatcatctccaccactctcgttcatcatcactgatgtgacattgatgtcatctgtgatttc

SEQ ID NO: 3074 - DNA, 353 bp, Gossypium hirsutum
  Clone ID: LIB3493-012-P1-M1-A1
gctttagatcataagtctgctgaggacttgagacagttgaaaggaataactgccacttacaggatgacaaacaaacctcttactgtcaggcattcgccttatgtagctgtggtattgcgcccatagaagactttcttggatggtgaacaagctacaaagtatttgaccaacgatgcgaggaatagtctactgctaggcgctgcaacagacataactattctgtattatgaattaactgctgacctcgtcagtgtggcagggaagacagagtcatcacttcaaagaataagacaaggcgcacaaagacgagcttgggcaagctcagatgtcttggatcataatgagtctgatac

SEQ ID NO: 3075 - DNA, 417 bp, Gossypium hirsutum
  Clone ID: LIB3493-012-P1-M1-A10
gcgaaaccctagccactctctgctcaactcgccaatgggggcttataagtacgtgtcggagctatggaggaagaagcagtcggatgtgatgaggtttttacagagggtgaggtgctgggaataccgccagcatccatcaattgttagggtcaaccatcctactcgccctgacaaggcacgccgcttgggttataaggccaaacaaggttatgtggtttaccgtgtccgtgttaggagggtggtcgcaagatgctctgtcccaagggtatcgtgtattggaagcccacaaaccagggtgttacccaattgaagttccagcgcagcaaacggtctgttgctgaggagcgtgctggccgaaagttgggaggtctcaaagttggtaactcgtactggatcaatgaggattctacttacaag

SEQ ID NO: 3076 - DNA, 464 bp, Gossypium hirsutum
  Clone ID: LIB3493-012-P1-M1-A11
caccattccaaccaaaaaagaacaagtcttctcaacctactccgacaaccaacctggagtgttgatccaagtctacgaaggtgaaagaacaaggaccagagacaacaacttgctcggtaaatttgagctctctggcatccctcctgctcctagaggtgtcccacagatcactgtctgctttgatatcgatgctaatggtatcttaaacgtctctgccgaagacaataccactggacaaaagaacaaaatcaccatcacatacgacaagggccgactcttcaaagaagaaattgaaaagatggttcaagaagcagagaaatacaaatccgaagatgaagaacataaaaagaaggtcgaggcaaagaatgcattggaaaactatgcatacaatatgaggaacacagttaaggacgaaaagattgggccaaactcccagcagctgataaaaagaagattgaagatgc

SEQ ID NO: 3077 - DNA, 490 bp, Gossypium hirsutum
  unsure (1)..(490): unsure at all n locations; Clone ID: LIB3493-012-P1-M1-A12
gggaaaatttaattgctgaaaccacgccaagatctatacccgagttagatatcgaagaagagttcgtattggctcgtgataccaaggaaggttgtcacgaaagtgaattggctcagaaaatgaaagaattgggtctacaaagggctagaaaatatggatggcaagacacctatgtgttcacaaaggctatgggagagatgatgatcaataatatgagaggagatttaccggtagtgataatacgaccgagtgtcattgagagcacttgcaaagaaccatttcctggatggatggaaggaaataggatgatggacccaatagtattatgctatgggaaagggcagctaacaggtttcttggttgatccgaatggagttcttgatgttgttccagcagatatggtagtgaatgcaancttggcagccattgcaagacatgggatgaccccaaaacaagatttaacatctacacatcgcattattagttgtaa

SEQ ID NO: 3078 - DNA, 358 bp, Gossypium hirsutum
  Clone ID: LIB3493-012-P1-M1-A2
gcccttccacatgccatcctccgtcttgaccttgcaggtcgtgatctaaccgatgccttgatgaagattcttaccgagagaggttacatgttcaccaccactgctgaacgggaaattgtccgtgacatgaaggagaagcttgcttatgttgccctggactatgagcaggaactggagactgccaagagcagctcatctgttgagaagaactatgagttgcctgactgacaagtcattactattggagctgagagattccggttgcccgaagtcctcttccagccatctttcatcgggatggaagctgctggaatccatgaaactacctacaactctatcatgaagtgcgatgtggata

SEQ ID NO: 3079 - DNA, 251 bp, Gossypium hirsutum
  unsure (1)..(251): unsure at all n locations; Clone ID: LIB3493-012-P1-M1-A3
gtcaaagctaaagattctgatgatgatggaaacccatcaggccattctcaaggtctttcatcaacaattgcagatgacgaggttgttaaatatttggagccattagcaatattggccgaaaaggttatcgaggatgaatctgtgctaagaataggggaaacttttgaaggtccctacaaggatcagagagaaccaaagatagtgcaggaggaaattgtgatgggagtatcagaacanacagttaaagatgc

SEQ ID NO: 3080 - DNA, 393 bp, Gossypium hirsutum
  Clone ID: LIB3493-012-P1-M1-A4
caaagcttcaagatgcaaattttcgtcaagaccctcaccggcaagaccatcacccttgaggtggaaagctccgacaccatcgataatgtcaaggccaagatccaagataaagaaggaatcccaccagatcaacagaggcttatctttgctggtaagcagctagaggatggtcgtacacttgctgactacaacattcagaaggagtccaccctccacttggtccttcgtttgaggggtggtatgcaaatctttgttaagaccctcaccggcaagactatcaccctcgaggtggaaagctcggacaccattgataatgtcaaggccaagatccaagacaaagaaaggatccctccagaccagcagagacttatctttgccggtaaagcaactaga

SEQ ID NO: 3081 - DNA, 386 bp, Gossypium hirsutum
  Clone ID: LIB3493-012-P1-M1-A5
cacagttccttgttaccttaaagaacaaaaaaatgaaagcgtctttgaaaggaaggtacgccaatgaaaagaacaccgccggcgctacattggtcgtcaacgccggcgatgttaagctacgcgcttccatgagtgacgccactttcgtcgacggtcctagcctcaacggcttgactttagccgttgaaaaacccggttttttcatcgtcgactatgacgtccccaaaaatgattttcggtttcagtttatgaacacagttagggttgcggagatgccgttgaagctcacttacagtcacagcagaggggataaccggacggcagtggaaggggcggttatgttcgattcggctaacacggtgtcggctaattacgtgcttggtact

SEQ ID NO: 3082 - DNA, 377 bp, Gossypium hirsutum
  Clone ID: LIB3493-012-P1-M1-A6
catcgatctatcaatcaatgaatcagctatcaaccttcaatcaatcatggtgtttgagaaagatcttaaccttgatgcaacggagctccgattaggcctaccaggctcatcggaggagtctcttaggatcagtaacaaaagagccttgcctgatatgaatgatgattctggtgtcgcagctgctaaaaaatgtgaccaagaaactgctccacccaccaaggcacaagttgtagggtggccaccgatccgatcatacagaaaagacagccttcaaacaaagaaaactgaggctgaaacaagtggaatgtatgtcaaagttagcatggatggagctccttatcttagaaaagatgatttaaaggtttataaggataccc

SEQ ID NO: 3083 - DNA, 191 bp, Gossypium hirsutum
  Clone ID: LIB3493-012-P1-M1-A7
gacattgaagaagagatgaaaagtatggagggaattcaacacaaaacagtgagcgtcaatggcatcaacatgcacatagccgagaaaggggaaggtcctttgattctcttcatccatggctgacctgagctctggtatacatggcgccaccagatcaacggtttagctgccctcggctaccgtgctttggc

SEQ ID NO: 3084 - DNA, 244 bp, Gossypium hirsutum
  unsure (1)..(244): unsure at all n locations; Clone ID: LIB3493-012-P1-M1-A8
taccgatagaactcctcgatctcagtttgaggtccgagagacttcactcatatggaactataaatattcagatgttgagtttggaagacttcaagcgagagatctgttgcagcatctttggactggtccgatctctaacgcatctctcgatgttgtccaaggtagacggccttgtgagggtgccgcattcgatcgaattcctcgagaaatagttcataataaangcatgaaagaacctattgat

SEQ ID NO: 3085 - DNA, 330 bp, Gossypium hirsutum
  Clone ID: LIB3493-012-P1-M1-A9
gccggtatcaatgttatccaaattgacgaggctgctttgagagaggggttgcctcttagaaagtcggagcacgccttctacttgaaatgggctgtccactccttcagaatcaccaactgtggtgtacaggacactacccagatccacactcatatgtgctactccaacttcaatgacatcatccactcaattatcgacatggatgctgatgtgataaccatcgagaactcacgttcagatgaaaagctcctttcagtattccgtgaaggagtgaagtatggtgctggaatcggccctggtgtctatgacatccactctcccagaatacca

SEQ ID NO: 3086 - DNA, 446 bp, Gossypium hirsutum
  Clone ID: LIB3493-012-P1-M1-B1
caaaaacagtaagaacttgggtccttttcagcaaatgggattttgctttcttataattatttgaagtcgtgaccggatcaagaagaaggtctgagctgcatctgccagagctcacaccatagctaacagagccaaatccagttcatttccagcaatgattgcccctatagcggtagctttgacagtgggcctcctgggatggacttatcgagcattaaagccgcccattccaaagatatgtggctcacccgatgggcctcctgtcacttctcccagaattaagctcagtgatgggaggcatttggcttacagggaagctggagttcccagggaagaggctaagtacaaaatagttgtcattcatggctttggcagctccaaagatctgaatttacctgcatctgaagaacttgtagaggaacttaggatctatttccttttcttcg

SEQ ID NO: 3087 - DNA, 379 bp, Gossypium hirsutum
  Clone ID: LIB3493-012-P1-M1-B10
gtagctatgatgggattaaggcgataggacaatgctgccaaatgctcgaagaattgaccctttctgaacatagaatggatggtgggtggttagctgggctttcgttttgtgggaatttgaagactctgaggcttaggtcttgtaaaagtattgataagagtccaggggcggatgagcatttggggtcctgtttgactcttgaagagttgcatctgcagggcttgcaagttcgggacaagcaaagtgttaaagctttgtttttggtttgtgagaatgttagggatattgtgttacatgattggtggggttttgaggacgatgtgtttagccttgcaagtatttgtaggagagggaagcttctttctctcgaaggatgctc

SEQ ID NO: 3088 - DNA, 190 bp, Gossypium hirsutum
  Clone ID: LIB3493-012-P1-M1-B11
taaagagaaaagaagagagatggcgtctgctattaaatctgcgagtcttaattatgccggtgttgttatctgagcgctgcagttcgggtgttaggttgctccactaacagcccattgctgaccccagcaacatggacgctatttctcccattgatgcactcatccctaccgcgttgactggaccccgtgt

SEQ ID NO: 3089 - DNA, 416 bp, Gossypium hirsutum
  Clone ID: LIB3493-012-P1-M1-B12
cggacgcgtgggataaatttaagggtcgcgagaaattcatcagttaaagcagttcagagctcatctgtggaatcagatactggaagatgggttagaaaaagacgacaccagaatgtagatggcgacttctttgtagatcatacatgcatagattgtgatacttgtcgttggatggctccgcaagtcttcacaagagttggtgaaatgtctgcagtttataaacatgcaacttctagcgaagatcgattaaaggctctccaggccttgctttcctgtccaacaagctcaatccgtaccgaagtgcctcctcctgatatcctagaagctcaaaagacatttccgatttcagtagatgagaagaaactacctggtgtttatcactgtggatatcattctgagaaatcatacggagctgc

SEQ ID NO: 3090 - DNA, 460 bp, Gossypium hirsutum
  Clone ID: LIB3493-012-P1-M1-B2
gctgtactgaaacatttcgagtggccggaacagaaggctgatgtattgcgtgaggctgcatttgggtattgtgatctgaagaaactagaatctgaggctgcatcgattcgtgatgatgcccgacaaccttgtggtcctgctctcaagaagatgcaggctctgcttgaaaagtatatataatcctgaatatctctgtttgcagtgcttgtttgtttgtttgcttgtatgtttgcttgttctcattcaattattaatctgaatatatatatctcattcaattattactctgaataatggcaggctagaacatggcgtttacaatctctcccgaatgagagaatccgctacaaagcgatacaaggggttccaaattcccatggattggatgcttgaaactggtattgaaagccagatcaagctggcatcagtgaaactaggggatgagtacatgagacggata

SEQ ID NO: 3091 - DNA, 374 bp, Gossypium hirsutum
  Clone ID: LIB3493-012-P1-M1-B3
catttgccttctacatgtttggagaagaactattcaaggatgagatgacaaatgaggaaagggaaataaaacagcatctattcgaggatcagcagcagcaacttgaggcaaatgttgagaaactttctaagtttttggaagagccctttgatcaatatactgatgataaagttatggagatacgaatgcaagtaatcaatctttctgtgatcattgattccctttgtaagaaaatgtatgagtgcattgagaatgattggctgggttctctccaacgaaatacccataatatcgctccatacaaatccaaaggcattgagaaagcatcagagccttgctgtctgtgtggagtggtaaagccagtactacctact

SEQ ID NO: 3092 - DNA, 443 bp, Gossypium hirsutum
  Clone ID: LIB3493-012-P1-M1-B4
gttgggaggcccttatattcctctcaaaactggaagaagagacggtagaaggagcagagcagatgttgtggaggagtatcttccggaccacaatgagaccatctctggcgttcttgacaggtttgccgccatgggtattgacacccctggagtcgttgccctcctaggagctcacagtgtcggcagaactcactgtgtgaagctggtgcatcgtttgtacccagaggttgaccctgccctcaaccccgaccatgttccacacatactccataaatgccctgatcagatcccagaccccaaggccgtgcagtatgtgagaaacgaccgtgggacacccatggttttggataacaactactacaggaacatactggacaacaagggtttgttgattgtggatcacacaactggcgtacgacaaaaggaccagaccttatgtgaag

SEQ ID NO: 3093 - DNA, 366 bp, Gossypium hirsutum
  unsure (1)..(366): unsure at all n locations; Clone ID: LIB3493-012-P1-M1-B5
agaaactcgaaggaggaaggaccagaataaaaaaaaaaagaaagaaagaaagaggaagaaacaggtagaaattaaaaaaaaaaaagttgaggccgaagagatgctaggaaaatgtggaaggatatcggagatagagaaatgggtaaaatccgcccgaattccttttcaagtcggatcaagtccaatcggatttccaatctccagctttccaataataaagacatcgtttctagtcacagaggctccatcaattcccttcatgtggatttgactgagggaagatatttgntatcgggtgcatctgatgcatcggctgctgtttttgatattcaaagagcaactaactatgaaggagatggtctgatt

SEQ ID NO: 3094 - DNA, 225 bp, Gossypium hirsutum
  Clone ID: LIB3493-012-P1-M1-B6
ctttcttggatggattaaagcaagggcaagaacattacatgaagctgatgaggattttgaagaggggggaatctccaatttgcttaagggatctgccagctcctttgagggttggaattgcatacataccactgtacagggaatgtgttgaggtggggggtcgtctgttatcgcaaaggctgagggggcagcttgttgaagcttgtcgaatgcttggaggtgggt

SEQ ID NO: 3095 - DNA, 250 bp, Gossypium hirsutum
  Clone ID: LIB3493-012-P1-M1-B7
gaaacagcttgtttcaaatggatcttccttaaattcttctgattggggtttaggtttacgagagcatgaaactgttaaattcccaacaaaaatagcctcaactaaaggaaaaccaaattggcaaggtaatgaagaaaggagagtggttgataaagaatatgaccttgtgatggttccatcagatggtgtgcatttatctggatatgaatcagatgcgccagactggtccattgggtgggaagaaccacat

SEQ ID NO: 3096 - DNA, 193 bp, Gossypium hirsutum
  Clone ID: LIB3493-012-P1-M1-B8
cggacgcgtgggttgcgatagaggaacaaccgcccgagttgaaaaaggagccgtcgtgcgcgacgcaggcggcgtcgggatgatattagcgaacaccgagactagcggtgaggaactggtggctgacagtcacttgttaccagccgtggcggttgggaggaaagtcggtgatttgatcagagaatacgcacgg

SEQ ID NO: 3097 - DNA, 442 bp, Gossypium hirsutum
  unsure (1)..(442): unsure at all n locations; Clone ID: LIB3493-012-P1-M1-B9
atacgacctcactatangggaaaggctggtanccgcctggcaggtacccgtgtccggtaattctccgggatcgactccacgcccgtccgtatttaggtactaataacacttgaccactctgcttgcaaaaaacagatgacggaagtgtgtatggaaaacgcgggaccatggtacctctttttgtcaagggtcatgtatggatggagctccttatctgaggaaggtagatttgagaatgtattcaacttaccaggaactgtcttctgctcttgagaagatgttcagctgtttcacccttggtcaatgtggggctcatggtactccttggaaggaaatcttgagtgagagcangttgaaggatcttttgcatggatcggaatatgtgcttacatactaggataaagatggtgactggatgctggtttgagatgtttcatgggag

SEQ ID NO: 3098 - DNA, 69 bp, Gossypium hirsutum
  Clone ID: LIB3493-012-P1-M1-C1
cggacgcgtgggcactaacttgcattgttcccaatgttagcacaaacacaacgtaaagcctatatgaag

SEQ ID NO: 3099 - DNA, 428 bp, Gossypium hirsutum
  unsure (1)..(428): unsure at all n locations; Clone ID: LIB3493-012-P1-M1-C10
cttctatcagtatgttgatagaaggttaagttatcactgcgatctgcttactcgtggcatgggtggtgttgaaatggagtcaagaaaagctgaagaatgggctagtcagcttcaatgttggtcccttcaactcattaattgcttcgcattcaaacctgagtttcttcccaccatatgcaaacctgaatttcttgtaaaactaccgggaatgtggggtggactatttaatgaaaactcacctgctggtattgtgtttgttagaaccatccgtcatcataagattggtaggggatctgttgccagctgtcctggcattatcgaagcattggttaatattgcttgctcgtctgatgattggcagtatatggcaaatgattgncttctttggttgcttcaagatccaagcacattgtataaggtgatcgata

SEQ ID NO: 3100 - DNA, 464 bp, Gossypium hirsutum
  Clone ID: LIB3493-012-P1-M1-C11
gccgtttttccgatgggcggctcaccattgatttcatagctgaggcatttggtctgccatttattaatgcctatcttgattcagtggggaccaatttctcgcatggcataaactttgccaccgcagcatctacaatcagattacctattagtgttatccctaatggtggattcagtccattctatttggggttacagtgctcacagtttgagcaattcaaagtgagatctcaaatgattaggaaacaaggagggttgttggcaagtttaatgcccaaggaagagtatgtttctaaagctttatacacatttgacattggccaaaacgatcttggagaagggttcttttcaaacttgactattcaagaagtcaatgcttctattcctgacataatcaacaaattctcagcaaatattaagaatatatacaatttaagagcaagattcttttgggttcacaacact

SEQ ID NO: 3101 - DNA, 359 bp, Gossypium hirsutum
  Clone ID: LIB3493-012-P1-M1-C12
ctcaaaactaatttgggcaggagaaaggttctgagatagcaaaacaattaccacccatggcaacggtctctgattcaccagaagatagtccaaaccctaatccaccaccatcgccgcccagcgatttcccttctaaaagcgaatcgaatgctcccgaacaagtcactccatggatcgattccgctgtggagcaagctcttctataccagaagatcatcgaacagaacgttaacgacgctatcaaagcttctagatctcgactttcagaaattcgctccacctgctcagctcattttaatctaaccattgagtcacttaaagatgtcaaatcacaacttgatgtctacgaggatttggca

SEQ ID NO: 3102 - DNA, 471 bp, Gossypium hirsutum
  Clone ID: LIB3493-012-P1-M1-C2
tgaaaaccaccgattactctcttctttgctctctctcaaaatcccgatcgggaactatcaacgaattctccaccacggtggatcaactcaaagccatcatccattacgcgacgtcacgtatcgtccctcaacaaaacttccgtgagatctccgttacattcgacgttctccagaaacgatctccttgcaatttcctcgtgttcggactcggttacgactcgctgatgtggacttcacttaacccgggaggtaacactttgttcctcgaagaagatccgaaatggatcctaaccgttctcaaagacgcgccgagcctccgtgcacacgccgtgaagtaccgtactcagctcaaacaagccaactctctgctcgcgcattacaaatcggagccgaactgtcacccttcgaaagcttacctgcgtggcagcccatatgtgaagctcgcctaggacgggtttcccgatgagttta

SEQ ID NO: 3103 - DNA, 416 bp, Gossypium hirsutum
  unsure (1)..(416): unsure at all n locations; Clone ID: LIB3493-012-P1-M1-C3
aaagatggcaggcgcagcaaattgggtttccataaccttactgttttcagtatgtttatcggcgtcctatggtaagaggaccggaatctccaccatggctgacggagccgatgggtttcaaccaagcaacggttttccgcatgaagctgatcctgattcttcaacctctatcgatcctgatcctaccggattcggtgctggcataggtataggttatgaaagaatcccttactgtatcgactgcgacgatgtggatatcatgggcggcagcttttgcggcacctgcaattacggatgcccttaccgcaggttcaataatgggtgttggttggtggtcgcttatatggatgaactcaaacgaacgattnaggaccttaccatgaaacttgatgcctatggtcttttagggaaaaaga

SEQ ID NO: 3104 - DNA, 426 bp, Gossypium hirsutum
  Clone ID: LIB3493-012-P1-M1-C4
tgatattgctgaaactgtccttttgaacatattacgaggtgatattgctagactgagtagatgcacttcaattataactggggaagatggaccgattcccagatgcaaaccttttaaatatacctatgagaaggagatcgtgatgtatgcttatttcaagaagctggactacttctccaccgaatgcatttattctccaaatgcatatcgtgggtttgctcgtgaattgataaaagatttggagagaatcaggcccagggctatccttgacatcattaaatcaggtgaggattttcgaatttccactacaaccaaaatgcctgagcagggaacctgtgaacgatgggttatatttctagccagaaatggtgcaaagctttgtcttgctgaggggcctgattgaggttaccaaagcttgcattggtc

SEQ ID NO: 3105 - DNA, 339 bp, Gossypium hirsutum
  Clone ID: LIB3493-012-P1-M1-C5
aaaatacacctctactacttcatttgttcccccgaccccccaacccaccccagacctcatttggattaggatcaagtttgataacacaatggaagttttgcatttcatttttggtgtctttgggaatgccactgctctgttcctattcttggctccaacgataacatttacgaggatcattaggagtaagtctacagagcattgctagggaataccctatgtcatggctttgctcaactggatcctctctggttagtatgtggttccctttgtatctaaatacaaccgttctgtttttaacatatcattggcactggtgcaggcatcgagaccatttat

SEQ ID NO: 3106 - DNA, 125 bp, Gossypium hirsutum
  Clone ID: LIB3493-012-P1-M1-C6
ggggttcaaagggtgaaagcgtacatattagacagcaagaaaatgttgcaactgctgctattgttacaagacaataattcgaccaatattgttgttgcgtacatacaagggaaagtaataaggat

SEQ ID NO: 3107 - DNA, 247 bp, Gossypium hirsutum
  unsure (1)..(247): unsure at all n locations; Clone ID: LIB3493-012-P1-M1-C7
ctcgcattacttggacaccagaagtgaagtcaagataacaaatgtggtagaaacggagatgattgaaagtcatatgcacaggcttgtgcaaatggagaactcggggttgattaatatgattgtcgatgaaaaatttgaggacttaggaaggatgtattgcttgtttcgtcaagtatccaatgggcttgttttaatcagagatgtcatgacttcattcatttgtgatactggtaagcagntactcact

SEQ ID NO: 3108 - DNA, 187 bp, Gossypium hirsutum
  Clone ID: LIB3493-012-P1-M1-C8
ggaaaactcaccggaaattcaccatgtgtacgttggagaaacgcggcaacctctttattttaacgtttaccggcgaagaccagcaccggtttaatcccaatgtcatcggctctccttctcagccttctctctcatgtcaaggctgaagccactcggggctcagctcttattacccaagcccaaggta

SEQ ID NO: 3109 - DNA, 399 bp, Gossypium hirsutum
  unsure (1)..(399): unsure at all n locations; Clone ID: LIB3493-012-P1-M1-C9
cttgaagcagcagcagcccatcatcatcatcatcatcatcatcatcatcatcatcatcatcatggtcatagctataatggtggtgactatggcgatgagttaaagcccagtaatggtgggtttttaaatcgggttgatttgaacaagatgcccgacccggaagattcggatggtgaatggttaaggtgatttgattcaatcatggccctccaaattgtgtggattaaaatataatnctttttgggggtggggggggccgtcgctagtggcggctgtgagctgataaaaaagggcgggaaaaaaaatgcggaggtggtagttgctaacatgcaccgtgggatgtagctaacgtgcgccgcagtggaggtaaggtaagttctatacatggggcggctgaag

SEQ ID NO: 3110 - DNA, 414 bp, Gossypium hirsutum
  Clone ID: LIB3493-012-P1-M1-D1
cccacgcgtccgggactatgcatgtggtgcaggcgccgactgtaaccctatccacttgaagggatcctgttttaaccccgacactgttaaggctcattgcagttacgccgttaacagttacttccaaagaaaaggccaagctcaaggctcttgtgatttttccggcactgccaccgttactaccgctgaccccagctatactggttgtgctttcccatctagtgccagtaccgcaggcaccaccacaacaccaacaactacaccgtcatccaccacaccctcgtccgtgaacccaatcaacaacaccccaacaagcacaacaccattcggttcgacaacacctactggaatatttgggagggttggcaacggcttaggcccgtccggaactggatcaacacagattacagtact

SEQ ID NO: 3111 - DNA, 433 bp, Gossypium hirsutum
  unsure (1)..(433): unsure at all n locations; Clone ID: LIB3493-012-P1-M1-D10
cggacgcgtgggctggatcacctgctcaattgactatcttttatgcgggtgaagtgaatgtctttgatgatattacccctgagaaggctcaagctatcatgtttttggctgggaacgggtcttccatggcttctaattcagcttatccaaaacccccggtccagactcctattttgaaaccagttcaagttgatagttggcctgcgaaccagctcataaatacgcaactgagcttcggnaagccaagccctttacctgtttcatctcatgctggtacgcagtcttggagtgggtccactagtaccgaaaaacagataatatgcaaggcctcagtaccttcaactccatctacccctattagcaaattggagagtccaaatttggtgaataccattggatctgatgctggcaccggcattgatccttctgttca

SEQ ID NO: 3112 - DNA, 458 bp, Gossypium hirsutum
  Clone ID: LIB3493-012-P1-M1-D11
gcgaagaagcaaatggggaggatgatttatcagatgatggttcacaggcaggagaaaagaagagaagacttaacatggagcaggtaaagactcttgagaagaactttgagttgggtaataagcttgaacctgagagaaaaatgcagctggctagggctcttggtttgcaaccaaggcagattgctatttggtttcaaaacagaagagctagatggaaaaccaagggactcgaaaaagactatgatctccttaagagacagtacgaagcgatcaaagcagataatgatgcactccaagctcagaaccaaaagctgcatgctgagataatgacactgaagagcagagaaccaaccgagtctatcaaccttaataaagaaactgaaggttcttgcagtaacagaagtgagaacagcttagattgtgagttggatatctcaagaacaccagcaattgacagg

SEQ ID NO: 3113 - DNA, 415 bp, Gossypium hirsutum
  Clone ID: LIB3493-012-P1-M1-D12
ggcaggaccctcggcgaacatcgaatacctatctcgagccaaggaacgtatcaaagaagggcttggagctcggcgtccatggaaacttatgttcaattttcactccatcaacttccctgggaacctctccgaagctattaccagggtcagaactaacgttgcttacttccgcatgaactacgccatgatcgtgcttctcatccttttccttagcctgttatggcaccccatctccctcttagtcttcgtagctatgatggccgcttggttgttcttgtattttctgagggatgagcctctagttgttttccggcgtacgatcgacgaccgcgtggtgctggtggtgtattgaggtgtgaccatcttgttcctgctggtgactgatgccaccaccaatattatggtgtcgcttttg

SEQ ID NO: 3114 - DNA, 426 bp, Gossypium hirsutum
  Clone ID: LIB3493-012-P1-M1-D2
cggacgcgtgggtttctctctaaaaagtggagcaaagaatccttacatcaaacagatggcaaccatggagaaggggttagagtttgagaacaagaatttaggcctgaagcacctaaacttcgtcagggtggctacgatccacgccttggtttgcatctcgaacctttacaattactctaaacagaactcggggccgttgagatccaccgtcgacgccgtcgagcgtgccgttaccaccgccgtcggtcccgtctacgggaaatttaaggatgttcctgatcattttcttggattccttgataacaaggtggatgaggtttcacacaaatttgatgagcatgctccagcaccagccaagcaagtggtaaccaagcccacgatttggtccaaaaggctcagaaactagtagaggaggctcgaaccaat

SEQ ID NO: 3115 - DNA, 374 bp, Gossypium hirsutum
  Clone ID: LIB3493-012-P1-M1-D3
ctctccctttgcaaatcgagggcgagcactctccttcctctttccgctgcttctgctttcgcattcgggtcttgcaaagaaggctggtactaccgctgccttggcctcgacccataaacaaccccacctcaatacctctattcctttccaccaataacccagatttgttttttttttgttatacgccccacaaaataacaaaacagacccttgtttctcttttctagagtgttggtgaattattcattcacctgtttatggttttgattctatgtcattttgaatcttgaacaaaatgttttcgaaagaatgttgctttacaagcagaagaagagccagggtcccaagggctacaggctcttgattagcgtcac

SEQ ID NO: 3116 - DNA, 344 bp, Gossypium hirsutum
  unsure (1)..(344): unsure at all n locations; Clone ID: LIB3493-012-P1-M1-D4
cggacgcgtgggtgacaaccttgtctccttccttaacaatgccaaaggagcaactgttggggatgctgtgaagaagcttggattatggggtctgtttacccgtggtcttcccctccgtattgtgatgattggaactctaactggagctcagtggggtatctatgatgctttcaaagtgtttgtggggctgccaactactggtggtgttgctcctgctcctgctgctgtggagcctgccaaggcatanaatgttggaaaacctgttgtcatggtggacaagtaaacgtatgattgctggaatggtttgtcaaagctggtggaaggatattcttttatgcgttgag

SEQ ID NO: 3117 - DNA, 392 bp, Gossypium hirsutum
  unsure (1)..(392): unsure at all n locations; Clone ID: LIB3493-012-P1-M1-D5
gcaaaatatcatgggcaagggtcctggtctctacactgaaatcggaaagaaagctagagatcttctttacaaggattatcagactgaccaaaagttcactttgaccactagctctcccactggtgtttcaattacctctgccggaacgaagaaaggtgatcttttcttggctgatgttaatacccagctgaagtctaggaatngtacaactgatatcaaagtggacacctgctccaatctatttaccaccataacagttgatgaacctgcacccgggctaaaggcaatctttggcttcagagtccctgatcagaggtctggcaagattgaactccagtatttgcatgagtatgctgggattagctcaagcattggattgactgcccacccga

SEQ ID NO: 3118 - DNA, 382 bp, Gossypium hirsutum
  unsure (1)..(382): unsure at all n locations; Clone ID: LIB3493-012-P1-M1-D6
gactgaagagatcaaaggcagcgcttcagaaatttaccatggagatgagatatgtcaagagaaatcaaagtttctgctggaggaaatgggcatgcccagtggacttttgcccctcaaagacattgaagaatgtgggtatgtgaaggacactggtttcgtgtggctgaaacaaaagaagagcataacccacaagtttgacaagattggtaagcttgtttcctatgcaacttgggncacagctgtggttganaaaaacaagatcaagaagctcactgtggtgaagaccaatgagcttctggtttggatcacactcagtgatttctatgatgatgatccaccaactgggaatatcactttcaagacacctgctgggcagttcaga

SEQ ID NO: 3119 - DNA, 420 bp, Gossypium hirsutum
  Clone ID: LIB3493-012-P1-M1-D7
gagcagaagggttcagatattttggcagaagctattccgaaattagttgctgaaaattgccagattgtagtccttggcacaggcaaaaaggccatggagaagcagattgagcagctggagatccaataccctgacaacgttagagcagtagccaaattcaatgtcccattggcccatatgattattgctggtgctgattacattttggtccctagtagattggaaccatgcggtctcattcagctgcatgctatgcgatatggaacagttccgatagttgcctctactggtggacttggtgacacagtcaaggaaggattcacagggttccaaatgggagctttcaatgttgaatgtgatgaattggatccaagtgatgtgattaaggtggtaaaaactgtcaagagagctcttgcaaca

SEQ ID NO: 3120 - DNA, 264 bp, Gossypium hirsutum
  unsure (1)..(264): unsure at all n locations; Clone ID: LIB3493-012-P1-M1-D8
cggacgcgtgggcgcgcgcttgacccacatattgaggaacaatttggcagtggtcgtctgttggcttgtatctcttcacggcctggtcaatgtggccgtgcagatggttacatcttggagggcaaagagctggagttctacatgaagaagatccagagaaagaaggggaagggagctgcttaaaaaattattgcatgagttttcagcattcatatcagattgccgcccttagggtnngcctttcacattttcatgacatttaaa

SEQ ID NO: 3121 - DNA, 408 bp, Gossypium hirsutum
  Clone ID: LIB3493-012-P1-M1-E1
cttcttcttcttttaactgttttttttctttccccattctcatagctttcatcatcttcaaatggctaaatcacttgtcattgttatgttatgttttctcttagtaattgttttacttggagaaatccaggcatcaagcccttctcaaaaacaaagacaaggcaaccatggaaatggaatgtatggtgccacccaagggagccttcgtcctcaagagtgtggtccgagatgcacacagagatgctcagctacagcatacaagaaaccatgcatgttcttctgccaaaagtgttgtgccaagtgcttgtgtgtgcctccaggcacttacggcaacaaacaatcttgcccttgctacaataattggaagaccaagagaggaggccccaaatgcccctagatccctaacta

SEQ ID NO: 3122 - DNA, 334 bp, Gossypium hirsutum
  Clone ID: LIB3493-012-P1-M1-E10
tggaaagcctgcagtcgtcactcgtgttgtggacagtatgactgacaacctgaggccaactcgtgctgaggcaactgatgttgccaatgctgttcttgatggaagtgatgcgattcttcttggtgctgagaccttgcgtggattataccccgttgaaaccatttctactgttggcaaaatttgtgctgaggcagagaaggtattcaaccaggacatgtatttatagaagactgtcaaatatgttggagagccaatgacccacttggaattcattgcttcctctgcggtacgagcagcaattaaggggaaagcatcagttattatatgtttcaca

SEQ ID NO: 3123 - DNA, 322 bp, Gossypium hirsutum
  unsure (1)..(322): unsure at all n locations; Clone ID: LIB3493-012-P1-M1-E11
ctctttctttctttcttcttcttcttcttcttcttcttcttcttcttcttcttcttcttcttcttcttgccttttccaaaccataaccatttttctacaccatatatatttatttttccttctgcatttccatattttgggggtattattttggaacttactgaatattttaaaataattcttggtttttggtcattagggtgttattattactttaaatctgccacaagatgtctagcanaaggtcgagacagtcaacagcaggtgttttgaggatttcagatgatcaaatcattgaacttgtctcaaagttactacagct

SEQ ID NO: 3124 - DNA, 405 bp, Gossypium hirsutum
  Clone ID: LIB3493-012-P1-M1-E12
gtttgaaacactggagtccaacaccaaaatgtcagctctgcttttgattcgcatgcttttcattacttcagcgacaccaattctggggtgtggatcatgtgggaaagcacacaagcatcgaaagcctaacggaaagtcccttaaacgtcccatcactttgcctagccttgtgaaacctacaatcaagttgccaccggtagttctcttcaatagttaatccacccattgcacctcctgcggttacggtccctccaattaaccttcccgcagggacggttccttcagtgactcagccaccaggagggaaaccctgtccaacaccaccaaccatagacacttgccccattgacacactgaaattgggtgcttgtgtcgatctgctaggagggttggtcacattggact

SEQ ID NO: 3125 - DNA, 400 bp, Gossypium hirsutum
  unsure (1)..(400): unsure at all n locations; Clone ID: LIB3493-012-P1-M1-E3
cccacgcgtccgtttgcattaaccaacatggctttgtttcgttcactgttactaattattttgattgttgctgtttcttcatgtcaaaccaatgcccaactctctcctaattactattcatccacttgcccgcaagctttgtctattgtgaaggccgaagttgcctctgctataaagaacgaaactcgcatcggagcttcgttgctgagattacatttccacgactgcttcgttaacggttgtgatgggtcggtacttttggacgataactcgacgtttataggtgagaaaaccgcggttcctaacaataactcggcgagagggttcaacgtcgtcgacaacatcaaagctcggctggagatagcgtgtcctgnagttgtatcctgcgctgatattctcg

SEQ ID NO: 3126 - DNA, 393 bp, Gossypium hirsutum
  Clone ID: LIB3493-012-P1-M1-E4
agatcatttgcccgcccaactcttctctcttagaggctggtttctttacattgcgttctcctgattcggcgactgcgtaattccgataaagtttgcagcccttggttgaatcacaatggcagtgtctgcaattgcatttgagggctatgaaaaaaggcttgaaatgaccttttctgagcctggcatctgtgctgatcctgaaagaaagggtcttcgggcacttaccaaagcccagctggatgagattctaggtccagctcactgcaccattgttgcttcattatctaacaagcaagtggactcctatgtcctctctcgagatagcctctaagtctatccatacaagattatgattcaaaacctgtgggacaactaagttgcttcttgctatcc

SEQ ID NO: 3127 - DNA, 435 bp, Gossypium hirsutum
  unsure (1)..(435): unsure at all n locations; Clone ID: LIB3493-012-P1-M1-E5
cctcaacccaaaaactcgtaacaatggccatgtccgtccctattttagccatcatctttgctctccatctcatcgccttcgtcttcgccgtcggcgctgaacgacgccgtagcttcgctacggtggtgcctgatcagtacgacgagaggacctactgcctctacagtacggatgcgtcgacggtgtacggactatctgcttttggtctgctccttcttagccaggttgttgtgaacggcgttactagatgtctctgctttggcaaaggccttgtctccgccacttcatccaccacttgcgccatctttttcttcgtttttcctggttaagctttttgggagctggggcatgtttactgggcggatcagcaaaaaatgcataccacaccaagtacagaggaatctttggcggagagaacatntcatgtgctacact

SEQ ID NO: 3128 - DNA, 287 bp, Gossypium hirsutum
  Clone ID: LIB3493-012-P1-M1-E6
ctctctttcactttcgttcatctccattattgtttcagatcgtaaaatcaaaaccaaattttcgtttaatttatacatataaacacccaaaaacaaaaaggacataaaaaaaggagattcaatggggatcttctccttcaatgccatagctttggccttcttattagccattatctctggcgccgtcaatgcttgcccttcttccgaccgagaagcattgctagctttatgttcatcgttaaaggagccttatttaggcatcttcgattcatggaaaggcaccgatt

SEQ ID NO: 3129 - DNA, 360 bp, Gossypium hirsutum
  unsure (1)..(360): unsure at all n locations; Clone ID: LIB3493-012-P1-M1-E7
agttcgcggacgagaacttcatcaagaagcacacgggacctggcatcctttccatggcgaacgctggacccggaacaaacggatctcaattcttcatctgcacgaccaagacggagtggctggacggaaagcacgtggtgttcggacaggtagttgaaggcatggatgtggttaaagcgattgagaaggtggggtctagcggtgggaggacttccaagcctgttgntattgctgactgnggacagctttgaaaaatggcttattgaatggggtttcctgaataatatctggtctttttaggctccttttgttttatgctatgctgcttctatggttactggggttttgggtttttttaga

SEQ ID NO: 3130 - DNA, 389 bp, Gossypium hirsutum
  unsure (1)..(389): unsure at all n locations; Clone ID: LIB3493-012-P1-M1-E8
gcggcgtcgtttcgtggatcccgaatcgtcgtagccattgtgatcggagttctcctcggctgtgtcatcgctttccttttcccttacggcctcttcaatcccgccgcctcagttcaaaatcgtcgaatcgggaaaacgaatttccagattggttcttcgtcatgtgaatcctcggagcggagtaagatgctgaagtctgaaatcgtatccctatcagagaagaactccgaattaaagatgcaagtcagggatttgacggaaaggctggaactggccgaacaaggaaaagatcaagctcanaagcaagttttggtgttgggtgagcagcataaagctggacccttcggtactgtcaaagctttacgaactaacccaactgttgttcccga

SEQ ID NO: 3131 - DNA, 446 bp, Gossypium hirsutum
  Clone ID: LIB3493-012-P1-M1-E9
cggacgcgtgggaaaaaaatggatatggacttatctcccaagtttccggcgacgttcgtggagacagaagatggcggatactataattgggcagctgccgattctccggtgctccgcgaggccaaagttgcagctggtaagcttgtgttgaagcctcgaggctttgctcttccacactatgcggattgctccaaagtaggttatgttcttgaaggtaaatgtggagttggattgacaacaacagcttccaacacaaaagaaaaaagggcattcataggtattaaaaaaggggacataataccagtcccttgtgcatcagtttcatgttggtacaattatggtgattcagacgtggtcatagtgttcttggccgatgcaaccaatgcctatgttgctggcgaaatcacctatttcttgttaacaggacctttggggcatttacatgc

SEQ ID NO: 3132 - DNA, 411 bp, Gossypium hirsutum
  Clone ID: LIB3493-012-P1-M1-F1
cgacgaacatggaaagagagcaacaagtttacttggcaaggcttgctgagcaagctgaacgatatgacgaaatggtcgaggccatgaagaatgttgccaagttggatgttgaactgactgtggaagagaggaatctgttatctgtggggtataagaatgtgattggagcaagaagggcatcatggcggatactgtcttcaattgaacagaaggaggaagctaagggtgatgaacaaaatgtgaagaggataaaggagtatcggcagagggttgaagatgagctttcaaagatctgtgatgatatactatccgtcattgataagcatctcattccatcttcctcgacaggggaatcaactgttttctattacaagatgaaaggagattattttcgttatttggcagaattta

SEQ ID NO: 3133 - DNA, 333 bp, Gossypium hirsutum
  Clone ID: LIB3493-012-P1-M1-F10
cggacgcgtgggcaaaaatcttcgtgtttctataaactaatataaaatatttgattccgattttgcattctggagcgaaaattgctgcgagtaatgcacgacatccactcgatcgaaggtggctgcatattctgcggcggtggcggtggaagtagatgtgtaggagaggggacagaatgttgcaagcgcaccctcctagcctccataggacagtgaagagtggatttggcgattcaatgccaccaatttctggtctgcaacatctacctatctttatcagatcctttcttttgtacaaactgccaaagttactcatcagaatgcaacttactc

SEQ ID NO: 3134 - DNA, 440 bp, Gossypium hirsutum
  Clone ID: LIB3493-012-P1-M1-F11
tggagaacggtttcttcttcactgctgcggaattttctttctccttttccacctcaaaaacaaaatatccgcagtagcgtttaagaagttttctctttaagcttatattattaaaaaaaaaaaagaaaaagagaagaaaaatggctcgctctttctcgaacgtgaaggctttctctacattcgttgtcgatggaatatctaacgcaatctcaagacggggatacgctgcaacatcacaaggagtagcgtcaaacggagtaaaggaagcagcaagaaacgctgcggtgttgaagaaaacaggggaagacatggcaacagcaactaaagacaaggttaactgggttccggaccctgttaccggattctatagacccgaaaacactgtgaatgagatctgccccgccgaactcagagccacgctcttgaagaagaactaaata

SEQ ID NO: 3135 - DNA, 424 bp, Gossypium hirsutum
  Clone ID: LIB3493-012-P1-M1-F12
gaatgggatagctggatgatgatccagttgcagcacattattcttgctcaatccgatgaatccattcctgagtgggcagcttgtatacgttacgcagttactgggaaaggaaagcatggaacacgagtaccccttctgagacaacagattttgaattgcttggtgacacctttacctacagctgtaactactacagtagtggcaaagcggtatgcttttatttcagctgcacttatagaactatccccacaaaaaatgcctgtgcctgagatacatctgcacagtaaacttctggatgagtttctgggtaatatgtgccactcttcagcccaagtaaggggagctattggggttgccctatctgtgttgtgctctaacattcggctttatgtgtcatcttcacaggatcattcaaatgaaaggg

SEQ ID NO: 3136 - DNA, 365 bp, Gossypium hirsutum
  unsure (1)..(365): unsure at all n locations; Clone ID: LIB3493-012-P1-M1-F2
cttttgtcctttttctctttcctaggttttaggttttctcagccaaaggctttcgtttagcttcatcaatggcacaggaggaggttcagaacggaggaccggagaaggtagcggaggtgagcttcacggcgctgaaaccgcagctcatggtggaagcacccaaggcagctgatgcggtgcagttctacaagtccgcgtttggcgctgttgaggctgggcgtaccgtgtaccctaagcgcaaggctgagcangagcagcctcatgtcctctccgctcaacttgagctagctggctctaccattctcgtttctgacatcgctgataactctactccggtgaaaaccgaggggacctggtgtgtgctc

SEQ ID NO: 3137 - DNA, 393 bp, Gossypium hirsutum
  unsure (1)..(393): unsure at all n locations; Clone ID: LIB3493-012-P1-M1-F3
ctcaatggcaatagcaatggtggacatgtgcatacatacatacataaacaactaaaaagctttaagaaagaaaggaaaaaaaagaacaagatccacctttctctttggattttcatctgcgctctaggagcagattcagttccccccccccaaaatttagggtttcgatttgatgttcttttaattgtaattaatcgntattgagactgtttaatttgtgaataatatatgtaataattatgagagaaattgaggattccttcaatnaagttggaaaatgtgaagaacagctgccgtctgcggaagagcttatgcctctttcacaaactctaattacccctcaccttgcccttgctttcgacatctcgaatccaaaccaccgtcaacggaaac

SEQ ID NO: 3138 - DNA, 375 bp, Gossypium hirsutum
  unsure (1)..(375): unsure at all n locations; Clone ID: LIB3493-012-P1-M1-F4
gtagagcttctttctagctatatccttatcagctttcaaagatggcaggaatcgcctttggtcgctttgatgattccttcagtttggggactgtcaaggcctaccttgctgagtttatctcaactttggtgtttgttttcgccggcgttggctctgccattgcttacaacaagttgacaactgatgcagccctagatcccgatgggctagtcgccattgctgtttgccgtggatttgctctctttgttgcagtggctatcggtgccaacatctcaggtggccatgtcaaccctgcagtcacttttgggttagctcttggtggccaaatcaccatactaactggcatctnttactggattgcccaacttcttggat

SEQ ID NO: 3139 - DNA, 425 bp, Gossypium hirsutum
  Clone ID: LIB3493-012-P1-M1-F5
ctttttgactcagcgattagatgcctacctggaatttcaggctgcaaattctaccttaatgaaaagctatggtcttgttcacgaagattgtataacaaagatgaggttgatgtcattggttgatcttggctctaatgaatctggacaaattccatatgccctcatcaaggatactcttaggatcaacgatgatgaggtggaattgtggattgttaaggctataactgcttagttaatcgactgtaaaatggatcagatgaaccaggttgtgattgtaagccgctgtactgagcgcatttttggacagcttcagtggcattctcttctgtcgaaactagcaacatggaggggtaatgttgctagcctcatcagcaccatccaagctaacaaggctgtggaagaaggctcacaagctatgcaaggga

SEQ ID NO: 3140 - DNA, 454 bp, Gossypium hirsutum
  unsure (1)..(454): unsure at all n locations; Clone ID: LIB3493-012-P1-M1-F6
cggacgcgtggggaagatcgaggaaacaatcggctttggcaagcctactgcagatgtagctgagattcacctcccttgtatcaatcttgagaaagcagaaattgtcgttgatgtcctcataaagaacccaaaccctgttccaatccccctcgtcgacattgactacctcattgaaagtgatggtagaaaactcctttcaggcttgattccagatgctggaaccatccatgctcatggtgaggagactgtcaaaataccagttactttgatatatgatgatatcaaaagtacatatgatgacattaagcctggcagcatcattccatataggcttgaagttgatctcattgggtgtgttcctgtttttggaggttactttacctctngagaaaactgggagagaccctataccttacaagccggatatcgatatggagaagatcaccttgagaga

SEQ ID NO: 3141 - DNA, 272 bp, Gossypium hirsutum
  unsure (1)..(272): unsure at all n locations; Clone ID: LIB3493-012-P1-M1-F7
gttttattattttattgacctaggccgaaattggctattacacatgttatcttaaatgttttctttatggaacaatgacttcatttattatgtgatgctagaaagccagtaaacatactaggcttgtatatcatctaagaaatgaatgaagagctctctgctttgcctttttaaaaaaaaaaaataaaagaaaaaaataatgatatgaataaacaagatatttanaaaanaaattaaanaaaataaaaatattttgtttaaaaattaaattg

SEQ ID NO: 3142 - DNA, 378 bp, Gossypium hirsutum
  unsure (1)..(378): unsure at all n locations; Clone ID: LIB3493-012-P1-M1-F8
ctccaaacttccaaaaatatggctctcaagtggtttctcagttcggcatttactcaagtttttggccataccgatggcggtaacttgcatgccaaggcagtggtatcgtgcccaaacgaaggacttatcggttgcaaggaaatggaaagagggattaccagcatcaaaacctgcaaggaagactaccctaatggctttcaaatgccagttcattatcctcgatgctcgaaggccaattacgagaagatggaagaatggaggaacgatatgttgttgaaggaatatggattcagctntaatggtggcaccgtcgatgagaaaagggcttttgccatgggagcttttctttggcctgaccaactttaagttacatatata

SEQ ID NO: 3143 - DNA, 412 bp, Gossypium hirsutum
  Clone ID: LIB3493-012-P1-M1-F9
cttaacacaagttacaaactcaaaaaccccaagttctcactttcaaaaaacttcccacattcaccatgtctgacaggtgcggcaactgtgactgcgctgaccgcagccaatgcacgaagggaaacagcaacaccatgatcattgagactgagaagagctacatcaacactgctgtgatggatgctccagctgagaacgatggcaagtgcaagtgcggtactggttgcagctgcacagactgcacctgtggccactaagccaacatacaatggtcatgcttcaggtcatggcatatatagggatctaaataatgaatttaaggttgaataatttgtctgttgtagtttgtgtggtgacttatatcttgtagttaacctttgtatcctttactatgatgtaatggctatgctta

SEQ ID NO: 3144 - DNA, 364 bp, Gossypium hirsutum
  Clone ID: LIB3493-012-P1-M1-G1
cggacgcgtgggcggacgcgtgggcggacgcgtggggttttctgagaataattttaaggttgagatcatcaacgatttgcctgcagataaaactatcacagtataccgatgtggtcccttggttgatttgtgtcgtggacctcatattcccaatacttcttttgcaaaggcatttgcatgcatgaaggcttcttctgcatactggaggggaaacaaagatcgtgagtgtttacaaagagtttatggtatatctttgcctgatcagaaactgttgaaggaatatattcgtcagatagaagaagcaaagaaatacgatcatagattattaggtacagagcaagaacttttcttttgccaccccctc

SEQ ID NO: 3145 - DNA, 122 bp, Gossypium hirsutum
  Clone ID: LIB3493-012-P1-M1-G10
attgtaacagtcgttaacaactgccctttcaccatttatcctgctatccaacccaacgcatgccaccctgtcctcgaacgaggcggatttgctcttaatacccttacccaccgttccttccc

SEQ ID NO: 3146 - DNA, 413 bp, Gossypium hirsutum
  Clone ID: LIB3493-012-P1-M1-G11
caaagttcagcgcctttactggtacaggaagacgcttggatgggaagcctctgaagctgcagtctccagcagcttcttcgtctgtgtcaaaagacaaaggacctgctatttctaatgggaataatacccgaccttattcgggatctatttcacaagctactgcaggccaggctcaagggaaactcgtttttggatcacatgtcaaccgttctaaggatacaaaacaggaatcgggaaaagagactaaatcggagcagcctgaaaagaaggaagagccgaagttccagccatttacagggaagaaatactctttaaagggttgattatattcatccacagttcatttacccgtgcgttgtttcgatacaagaaaacaccgtaaccatactttggacattgtattatcgaaaaac

SEQ ID NO: 3147 - DNA, 472 bp, Gossypium hirsutum
  unsure (1)..(472): unsure at all n locations; Clone ID: LIB3493-012-P1-M1-G12
caattatcttaaagcctgccatataatcatataaccaggctccgtcgtggtactctccggccaccacaatgccgaaaatcgccttgggaacaagccaagaggctgctcagcctgactgcatcaaagcccttgtggtcgagtttatcaccactttcctcttcgtattcgttggagtaggagctgccatggccgccgatgagtcgggggcaaatgcgctggtgggattgtttgctgtggcggtggctcatgcccttgtcgtcggcgttatgatatcggccggacacatatcaggcggccatcttaacccagccgtcacgcttgggttgctattcggtggtcacatcacggtggtccctgcgatcctctactggatcgatcagttgttggcatcttcagcttcttgtatacttctcaagtatctcactggaggattgaacaactcggttcacacattancaaggggaaatgggtt

SEQ ID NO: 3148 - DNA, 432 bp, Gossypium hirsutum
  Clone ID: LIB3493-012-P1-M1-G2
gatcccatcatgcttggcgtcgttgcccaacttgagagtcttggatcttatcggaaattccttatcgggaaaaatcccagaccagatagggaaccttcaaaagctcaccgtcttgaacttagctgataataaaatcaacggcgaaatcccaagctccattgttcaactttccagtttaaaacacctcgatttgagcaacaacctcctcaccggcgaagtcccggccaactttggcaacctgaaaatgctgagccgtgcattactgagtggaaaccaactcactggtacgatcccaatctccatcagcaacatgtaccggttagccgacttggatttatcgagaaacaaaatacagggtcaaataccagcacagttaggcaaaaatgaaggtgctcgcaacgttggacttaggcagcaacatgctcaccggcg

SEQ ID NO: 3149 - DNA, 431 bp, Gossypium hirsutum
  Clone ID: LIB3493-012-P1-M1-G3
aacaattaaaaagaaccgaaaaaaaaacacagattaagacagaagcatggccagccagctcgtaggaacaaagagagcttgtgtcgtgggtggcagcggattcgttgcctcattgctggtcaagttgttgctcgagaagggttacgccgttaacactacagtcagggaccctgacaaccagaagaagatctctcaccttgtaacactacaagagttgggagacttgaagatctttcaggcggatttaactgatgaagggagctttgatgcccctattgctggttgtgaccttgtcttccatgttgcgacacccgttaactttgcttctgaagatccagagaatgacatgatcaaaccagcgactcaaggagtggtgaacgttttgaaagcttgtgccaaagcaaaaacagttaaacgagtcgtcttgacat

SEQ ID NO: 3150 - DNA, 462 bp, Gossypium hirsutum
  unsure (1)..(462): unsure at all n locations; Clone ID: LIB3493-012-P1-M1-G4
cttggagatgaggtttaccaacagaatatataccaggatgagcgcccctttatcagttctagaaaggtgttgatggatatggggcctccaattagcaaggaagtccagcttgtttctttccacactgtgtctaaaggatattggggtgaatgtgggcagcgagggggatactttgagatgaccaacattcctccaaagacagtttgcgagatatacaagattgcatcaatgtcccttagtcctaatgttcccgctcagatatctatgggattgatggtcaacccactcaaacctggagatgtttcatatgatcaatatgttagggaaagcaagggaatccttgaatcattgagaagaagagcaaggataatgactgatggatntaacagctgcaagaatgtggtttgtaatttcactgaaggtgccatgtattcttttcctcaaatacacttaccaccaaaa

SEQ ID NO: 3151 - DNA, 208 bp, Gossypium hirsutum
  Clone ID: LIB3493-012-P1-M1-G5
gtagagcttccttctagctatatccttatcagctttcaaagatggcaggaatcgcctttggtcgctttgatgattccttcagtttggggactgtcaaggcctaccttgctgaggttatctcaactttggtggttggtttcgcccgcgttggcttttgccttggttaccaccaggtggccaccggttccacccttgaatcccaaggggt

SEQ ID NO: 3152 - DNA, 391 bp, Gossypium hirsutum
  unsure (1)..(391): unsure at all n locations; Clone ID: LIB3493-012-P1-M1-G6
cccacgcgtccgcaaaaaccctcagtctttaattccacatctccttctgtttaggctttggggattccgagttatcttcgacagtaaccttaaatcttcagctatggctgctagaattcttgcaaacttgattgttatgggatctggaatattgggaagggctgttttccaggcataccgtcaggctcttgcaaatgcctcaaaatctggtgtcgctcaagaaacaatgcagaatatcaggagaggaagcaaaattatggccgaaccagaggcaaggcagatattaggtgtgacagagcattcatnnctgggaggagtcttgaagaaatacgacaacttgttcgagcaaaatgctaagaacgggagcttttaccctcggtcaaaggttcat

SEQ ID NO: 3153 - DNA, 382 bp, Gossypium hirsutum
  Clone ID: LIB3493-012-P1-M1-G7
cggacgcgtggggctttgtgacctctgcaacatcactgttaacaagaatgctgtttttggtgacagcagtgccttggctccgggaggtgtacgaattggtacacctgccatgacttcaaggggtttggttgagaaggactttgaacagataggcgagttcctccaccgagccgtgacaatcactttgagcatccaaaagcaatatggtaagcttttgaaggacttcaacaaagggttggacaacaacaaggagatccaagagcttgaagttgatgttgagaagttctcatcctcattcggattgcctggcttcaagatgtccgaaatgaagtacaaggattagatcttaataaccatacgatgtaattgtgttattatcagc

SEQ ID NO: 3154 - DNA, 261 bp, Gossypium hirsutum
  Clone ID: LIB3493-012-P1-M1-G8
tctagaggtctggtctactcaacactctctcctccctcttagcaaccaaagactcagatccgctcggatttctttgtcccagaactagaatggagacctttctattcacatcagagtccgtaaacgagggacaccctgacaagctttgcgaccaggtctctgatgctgttctcgatgcctgccttgcccaggaccctgacagcaaggttgcctgtgaaacatgcacgaaaactaacatggtcatggtctttggagagatta

SEQ ID NO: 3155 - DNA, 411 bp, Gossypium hirsutum
  unsure (1)..(411): unsure at all n locations; Clone ID: LIB3493-012-P1-M1-G9
ggaaaaagcagctcactttctccttcatcaaaccccaaaaacctagctttgcctcctttttaatttcttggattttggtgaactttatgaatccaagatcagagtataaaggattcgagttttaaccccagaattaagtacatctgctctttttgatctttgggttgaaattgtctacacaaagagggtgatttagaaatggatgctgatccatggactctttgtctttcttcaactgctaggagatatcaatcagctcttcagtcacgatctgatatgtttatggggtttgaagaaatggatggagaagacgatgtaagaagagagtttccatgccctttttgttcagagtatttctatatcgngggcttgtgctgtcacattgatgatgaacatcctgtggaggcttac

SEQ ID NO: 3156 - DNA, 423 bp, Gossypium hirsutum
  unsure (1)..(423): unsure at all n locations; Clone ID: LIB3493-012-P1-M1-H1
gttgcctcctaggcttaagaggagagtggaaatggggtttgtgtattcaatgccaccaattagctggtcagatatatcttactatcataatcagattcttcctctgatacggaagtataaagttgtacatttgaatagaactgatgctcgacttgccaacaacgggcagtctttagatgttcagaagctgcgatgtcgtgtaaattttaatgctttaagattcactcttcagatagaagagtngggtaaacgagttattaagcttctgaggcaaaatggtcctttcatagtacttcaccttagatatgaaatggacatgttagcattttctggctgtacgcaaggttgcaacaatgaacaagtggaggagtgacaagaatgagatacgcttatccatggtggaaagaaaaaataataaattct

SEQ ID NO: 3157 - DNA, 396 bp, Gossypium hirsutum
  Clone ID: LIB3493-012-P1-M1-H10
ggtgttttgtgattaaaaaaactaccaagattgtggcaaaacaagatggcttccctgcatgaaccatggctactggagaacgggttgaaggggtctagcaaggagattcgccatggcaggactgcacacaacatgtcgtcttcgtcgttgcggaaaaaatcggacctgacgcttgtttccaaggttcggtatgcaatgcttaggcagttcctcgccaatcttcaagaagtcatattagggaccaagctctccgttctcttcccagctattccattggccattgttgctgagtgttatggatttggaagacccctggtgtttgcattaagtttactcggacttacaccattggctgaacgagtcagctttctcaccgagcaaattgcttattacact

SEQ ID NO: 3158 - DNA, 427 bp, Gossypium hirsutum
  Clone ID: LIB3493-012-P1-M1-H11
gatggttcagaaagcaggtctgaagcttcacgtatcgctctgcttccacgcttcgagtcaaccgagaattccgcttcccaagtgggtaacgaagattggcgaatcccaatcaagtatcttctttgcggatcgttcaggacagcattatcagcaatgtctatcactggctgttgatgatcttgctgttcttgatggaaagactccggttcaagtctaccagggctttggcgagagctttaagtccacattctcacctttcatgggttctaccatcacgggcatctcaatgggtcttggaccagatggtgaactccggtatccctcacaccacaagcctgccaagagtggcacgattactggagtcggggagttccaatgttatgacacaaacatgcttaaccttcttaagcaatatgctgaagccaat

SEQ ID NO: 3159 - DNA, 395 bp, Gossypium hirsutum
  Clone ID: LIB3493-012-P1-M1-H12
aaaaaaccttacctttattgcttaaatttatataaagtttcttactttgcatatatatagttagcattatatcgagtagcttcttttttgtttcagttacaatgggtgactcactgaactcggaaactgagtctagcacggttagtaacaactcgtctccttcaacgtcaccatatgggaaaagattgggtactgagttaatacccgacccgaaaagggaaaagcgtccgagagataatagtaagcatccggtttaccgtggggtccgaatgaggtcttggggtaaatgggtatccgaaatccgagagccccgaaaaaagaaccggatctggttaggtactttctccacacccgaaatggcagcacgagcacatgacgtggcagctttgagtatc

SEQ ID NO: 3160 - DNA, 197 bp, Gossypium hirsutum
  Clone ID: LIB3493-012-P1-M1-H2
cggacgcgtgagctcggatgcacgggatataacgaaggtcaaggtgaaggtaactaacaccaaatggcagagcatgagccgtaactggagtcaaaactgaccgtcaaacaccgggttggtgggtcacgcactctcgttcagagtcaccgacagtgacaggcgcacctccacttctttgaacgtggcacctgcaaatt

SEQ ID NO: 3161 - DNA, 319 bp, Gossypium hirsutum
  Clone ID: LIB3493-012-P1-M1-H3
cgagcatggtaaattttatagaccagatcgacacattcgggctcttcacaaagtgttaccaatgtccaccaccgtcagtggcggtttcacctccatcccacggcctcaacaccaccgcagccgctcctctacaccaaccattcaaccacactcgccgccactgatttactatatatatttggattggctggtaaaattaattattgtaaacacacaatgccatccaatggttttttttttagatttagcttagagagtttgcaatgcatttccaagagaatattaaaaaaaaaaagttaaattttggttttcaaaagaa

SEQ ID NO: 3162 - DNA, 446 bp, Gossypium hirsutum
  unsure (1)..(446): unsure at all n locations; Clone ID: LIB3493-012-P1-M1-H5
gaattttcttacgtcttcttcttctcttgtagacttctctgccattcgtgtaattaaatgttattcatggagaacttgcaactcgtttttagcacattagctctgctctgatttgttcagttgctgtagtagtctgggagtgattatgctcaggccatgttgctttggcttttaaatttccaatagcatgtaatctttattgttattattgcctttcctgaaagtgaattggagatttggattcggngtgcccttgtatatttgcaagttcgaacatccacgtcagataaaatggggtcctgtgggtgttcacaggctagttgtgattgctatttatggctccatactgtttatataccattccaagtggagagaaaggtaaccttgtatgttcatcttgaatgcactaaaactgtttgcttgtgcactaactggaaatggagcta

SEQ ID NO: 3163 - DNA, 329 bp, Gossypium hirsutum
  Clone ID: LIB3493-012-P1-M1-H6
gtaccgttgagcttaatggaaccaatggcgagactttcacccagggtctggatggccttgcacagcgatgccagaagtactatgaagctggtgctcgctttgctaaatggcgtgctgtccttaagatcagtgctaatgagccaaccgagcttgcaatccaagaaaatgccaacgggctagctatgtatgctgccatctgccagcaatgtgggcttgtgcccattgtcgaactgggaaattttgtagacggatcacatgacatttaaaagtgtgctgcattgacggagcgtgatcttgctgcttgctacaaggctctaaatgaccaccat

SEQ ID NO: 3164 - DNA, 288 bp, Gossypium hirsutum
  Clone ID: LIB3493-012-P1-M1-H7
cccacgcgtccgcaaacacaaacatattactgctcactatagcctaatagtggaattgttgaaagagaaaacaaaaatggaggtagctttccctgttattgacttgtccaaaatcaatggtgaggagagaggagccaccatggacatgatcaaagatgcttgtgagaattggggtttctttgagctgacgaaccatggaatatctcatgaactgatggacactggggagaaactgacaaaggagcattacaaaaagtgcatggaggataggttcaaagaaatggtgac

SEQ ID NO: 3165 - DNA, 382 bp, Gossypium hirsutum
  unsure (1)..(382): unsure at all n locations; Clone ID: LIB3493-012-P1-M1-H8
cccacgcgtacggccacgcgtgcgacctaatcttgtacctctctcaacactagttcacgaagaagaagaaagcacagaacaaacttattagcgaaatggatcgtattcctcaagagcttgcacttgatatactatcaaggcttgcaatcccaagcttagtgcaatccaagtccgtgtgtcaagactggcgtaccttaacacatgatcaactacttgtcaacaagcatttcaagcagatggttgagaacgatccaagcttcattttgcacatcatgggttattccatccaaaaccagctntattttggagatttatccagcgaccgaaatgattggaacgtgacgatgatagcaaagaagcttaccataccaccattggttaa

SEQ ID NO: 3166 - DNA, 418 bp, Gossypium hirsutum
  Clone ID: LIB3493-012-P1-M1-H9
cccacgcgtccgcttacagcaaaacttcatgcagccaaagacaagtacttgtccacctcacaaccgctgccttcaaatatcaaggggaagtgggatttatcatttgcttcgatctggaacactgttgtgtggcttatgctaatgaacttctttgtcaagattgtcaatgcaactgctcagagatattataaaaaacatatggatgagcaggtagatgacaactggtctgcttcaactcattccgattaagaagagtctgactgcatttatctcgataaaacaggtgtattagtgaacttcaaggtaacctgtctttccataagttattacccattggaactacttcaaaagaaacccctgcactaagctagtcccctgttagaaagttgtatagacagaacaaaaattaggaacaccg

SEQ ID NO: 3167 - DNA, 342 bp, Gossypium hirsutum
  unsure (1)..(342): unsure at all n locations; Clone ID: LIB3493-013-P1-M1-A1
gcggcataagagttttaaggaaaatgcagatcttcgngaaaaccctaactgggaagaccataaccctagaggttgaatccagcgacactatcgacaatgttaaggctaagatccaggacatggaaggtatcccgccagaccancagaggttgatcttcatcagaaagcagcttgaggatgttcnnncncttatcgactacaatatccanaaagaatcaacaatgtatataattcatatatgcatnnnnnnatgagntancanacnatnnnngatggcattggctaggaaatacanccaggacangatgatcaatcanaaatgctatgctcttttacaccccc

SEQ ID NO: 3168 - DNA, 322 bp, Gossypium hirsutum
  unsure (1)..(322): unsure at all n locations; Clone ID: LIB3493-013-P1-M1-A10
agcatttctctttctttactctcttataattttcccccatcttaaaactaaagaaaaataacaatgtccgcagttgctccttctttttccttgagtgtgctctgttttgcttcattgctctcctttttggctgtggtgaatgcaagaatccctggagtttttactggtggagctngggaaagtgcccatgctacattttatggnggaagcgatgcttctggaacaatgggcggtgcatgtgggtacgggaatctctacagtcaaggctatggcgtgaatacagcagctttaagcactgcacttttcaataatggccttaggc

SEQ ID NO: 3169 - DNA, 416 bp, Gossypium hirsutum
  Clone ID: LIB3493-013-P1-M1-A11
gattttgaagatgaagagcaagcatgttgctgggacattcaccaaaaagaaaaagaatgttgttctggaggtgtgcaaggacattccgtcatggccagggagacacctattcgctagcggagagcagcatcgttattttggattgaagactgaaacgagagggattattgagttcgagtgcagaagtgagagagaatatgatatgtggactcaaggtgtgtcgaggcttcttttgattgctgctgaaactgaaaggaagcacagaagacaaagttcaactacatggcctcctggtggccagaatttggacttagattagctcatctgccttgcttttaagctagattgcttacagagagctcaatgcaaagcaatggacgaaccattcaagccaagggaaaatatctgggaacatt

SEQ ID NO: 3170 - DNA, 252 bp, Gossypium hirsutum
  unsure (1)..(252): unsure at all n locations; Clone ID: LIB3493-013-P1-M1-A12
tttcatggcattccctgtttacccttctaccgagcctcgttaaatgagccagcctctgtgtgttgaatataccccacaatgggcccactctttgaagagggaaagatcactggttgaatctcattnttgtacgggaaggntctccccaacccaacgctccataatcgtcgatttcatcaactctttgagctccgccggcaaacccaaaggttccgtcggcgtcgttttggtggaaaacgacggagaaaatac

SEQ ID NO: 3171 - DNA, 311 bp, Gossypium hirsutum
  Clone ID: LIB3493-013-P1-M1-A2
acggcggcataagagttttaaggaaaatgcagatcttagtgaaaaccctaactgggaagaccataaccctagaggttgaatccagcgacactatcgacaatgttaaggctaagatccatgacaaggaaggtataccgccggaccagcagaggttgatcttcgccggaaagcagcttgaggatggccgtacacttgccgactacaatatccagaaagaatcaacattgcatctggttctgaggcttcgtggtggcattatcgagccatctttgatggcattggctaggaaatacaaccaggacaagatgatc

SEQ ID NO: 3172 - DNA, 358 bp, Gossypium hirsutum
  Clone ID: LIB3493-013-P1-M1-A3
gggaattattagagatggtgggtggcggaagagccaaggcggaggaggagatagagcaagaagtggggattgaagatttgattcctagtggtaaggctaataagcctctttgggcgcgtggggttgacttgcttggctactccttgaactctttcaagctggcgaatctcaacttcattgatgctaattcggctcggcactctcaggttgtgaggttgaagatgaacccagatgataccgacaggcttgttgctggctgcaaatcaaggggtattaaactctgtggagccctggcagctgctggtatgattgcaactcggtccaccaaacccttccctgatcatcaaaaggaaaaata

SEQ ID NO: 3173 - DNA, 245 bp, Gossypium hirsutum
  Clone ID: LIB3493-013-P1-M1-A4
aaaaaattgagtgtcagtttgaaagtgttcttcagatatggctatgaaacaagttgctaattctgctatcaaagcaattgccaattctgggtcatcctctcttcttaccagacaactccatgcttctccagggagcaaaaagattgttggggtgttttacaaggccaacgagtactttacgaagaatcccaactttgttggttgtgtggagggagcctttgggttgcgcccatggctggaatcac

SEQ ID NO: 3174 - DNA, 381 bp, Gossypium hirsutum
  Clone ID: LIB3493-013-P1-M1-A5
cggacgcgtgggaaaatttcgcacctgaaaacgagcttggccgtggtggcttcggagtagtttataaaggggaactagatgacgggacacaaattgcagttaaaagaatggaagctggtgtgattacaagcaaggctttggatgaattccagtctgaaattgcagtcctttcaaaggtccggcaccgtcatttggtatctcttttgggttattccattgaaggcaatgagagaattcttgcttatgagtatatgactcaaggagctcttagccagcatcttttccattggaagagcctgaaattggagcctctatcttggaagagacgactaaatattgcccctggtgtagctagaggaatggagatcttcacacactggc

SEQ ID NO: 3175 - DNA, 314 bp, Gossypium hirsutum
  unsure (1)..(314): unsure at all n locations; Clone ID: LIB3493-013-P1-M1-A6
gtcctcgttactggagctgcaggacaaatcgggtatgctcttgtacccatgattgctaggggagtcatgttgggtgctgaccagcccgtgatccttaacatgcttgatatcccacccgctgcggaggctttgaatggtgtcaaaatggagttggtggatgctgcatttcctcttctaaagggtgttgttgctacaactgatgctgnngaggcatgcactggagtcaatgttgctgncatgggtggggtttcccaaggaaggaaggaatggagagggaaagtgttatgtcaaagaatgtgtctatttacaagtct

SEQ ID NO: 3176 - DNA, 277 bp, Gossypium hirsutum
  Clone ID: LIB3493-013-P1-M1-A8
gcggtttgagcggtcgaagaatcattcaatttaaggggaaaaagaaaaaaaaataccaaacatgtcgaaatcggagattgaaatgcctccaaagggtgggtttagcttcgatctttgtaaaagaaacgagatgctttcaaagaaaggcgttaatccgccgtcatttcgtaaaacgggtaccacaattgtcggcttgatcttccaggatggtgtaattcttggagcatacactagagcaactgaaggacctatagtttgcgataaaaattgtgaaaaa

SEQ ID NO: 3177 - DNA, 313 bp, Gossypium hirsutum
  unsure (1)..(313): unsure at all n locations; Clone ID: LIB3493-013-P1-M1-A9
gaaaaaattaagcaagaaagagaaactgatggatagggagtttaagaaagatcctagtgagatcacctgggatactgttaacaagaagtttaaagaggttgtggctgctaagggaaggaagggaactggaaaatttgaacaggtcgagcagcttaccttcttgacaaaaggtgccaagactcctgctcagaagcttgagatccttttcagngttatctctgcacagtttgatgttaatccaggtcttagtggacacatgcctataaatgtgtggaagaaatgtgtacagaatatgcttgtcatattggacatt

SEQ ID NO: 3178 - DNA, 358 bp, Gossypium hirsutum
  Clone ID: LIB3493-013-P1-M1-B1
cgtattctccgctcataccccaaatccccataccccttctgttcaacagcaaagatggcaactgtgcgagttacctcctctagtatcgttcaagcttcgatcccgaaccgattcacgagtgccattgtcaaggccccgacttctcttggatcttttaagaacatctgcaaaccttttggcttgaaatgttcctccaatcacaaaacatttatggcagcttataagattaagcttgtaggaccggatggtgaggtgagcgagtttgaagcccctgacgatcaatacattttagatgcagccgaggaagcaggagttgaactgccatactcttgccgagctggagcttgctccacatgtg

SEQ ID NO: 3179 - DNA, 497 bp, Gossypium hirsutum
  unsure (1)..(497): unsure at all n locations; Clone ID: LIB3493-013-P1-M1-B10
gcgtgcagagagaaaatgaccaagagtttccgagatcatcacgaggaagacgagaagtcaggtgaaaaggccaagaggaaggctcatagggccattcccatgatactacctgatgtggacatatgcacagtctagggtggaccttagtgggaatggaaggtgcacaaccaaggagctgggnntagtntgaaccatgtagagctaagtcagttcgagacatgggggggggtttggtggtgntatnggtcgtacactatttacttttggcccctctttgccttcggtcagttcctcaacttcagggtgtatcaatcgcttggtgaatctggaacttattacggtgtacgctttggaaagaatattccatgggtaaggnnattcccttttggggtcattaaaggtccactnnttgttgggagcatnttgagtctcggagcatgtctatcttgggtaccgcttcaatattttctcctttggtcgtggggctatctatttat

SEQ ID NO: 3180 - DNA, 410 bp, Gossypium hirsutum
  unsure (1)..(410): unsure at all n locations; Clone ID: LIB3493-013-P1-M1-B11
cgctttgtttcttcaattagaagcgtttcttgttattctttgggtggttttgagagtggaatcagagaaaacccaaacgaaaatggagaggagtactccagtgaggaaaccacacacttccactgcagatcttctcacttggtccgagactcctcaacctgattcctccgcctccgccgctcgtcccacccgccctcatcagccgncggatgggatcagaaaagtggtgtttggaggtcaagtgaccgatgaagaatttgaaaacttaaacaaacggaagccttgttctggatataaaatgaaggagatgacgggtagtggcattttcgcagccaatggagaaaatgatgaatcagaacctaggcagngctaatcctattccaaacagcaaaaccggacttccaatgtcc

SEQ ID NO: 3181 - DNA, 314 bp, Gossypium hirsutum
  Clone ID: LIB3493-013-P1-M1-B12
ccgcagttccgcccacgcctacgctgataatgttttttaacgaaaacgattccgcactgaattccgatgccaatcacttcattttcactgttccgcagccgcttacccggcataaccaccgttctccgccgtcactcaccaccctaccgccacctctttatcgtctccgccaaacagacccctcccaatccaagacaaagcgtatccaagaaaccccaacccaacaagaatctcctcaaggctaaacacaccttcaaagattactcctccttagctcccgtgcttgcccctaatgaaactccatctctttccga

SEQ ID NO: 3182 - DNA, 455 bp, Gossypium hirsutum
  unsure (1)..(455): unsure at all n locations; Clone ID: LIB3493-013-P1-M1-B2
cggacgcgtggggttttcacagcaagggcagacgggggctgggatgtatcaaggattgatcaggctcacccagtgggggtaacatctgtttcatgggctccatcaacagcacccggtgctcttgtcggttcgggtttgctggaccctgttcagaaactttgttctggtgggtgcgataacactgtaaaggtgtggaaactctacaatggaatctggaagatggactgctttccagctctccaaatgcatactgattgggtacgggatgttgcttgggcacccaatttggggctaccgaaatctaccattgcaagcgcttcccaggatgggaaagtaattatatggacagtggccaaggaaagggatcagtgggaaggtaaagtattgcatgattttggtacccctgtgtngaaggnnnncngtcattgactggaaacatattggctgtggctgat

SEQ ID NO: 3183 - DNA, 84 bp, Gossypium hirsutum
  Clone ID: LIB3493-013-P1-M1-B3
gacccacgcgtacgaccaactaccacttcattggtactgaattgggaccaggtgttaacgaatgatatggatcttacaaggtaa

SEQ ID NO: 3184 - DNA, 451 bp, Gossypium hirsutum
  unsure (1)..(451): unsure at all n locations; Clone ID: LIB3493-013-P1-M1-B4
cgaaaagagaaaatgaccaagtgttacccaactgtgagcgaggaataccagaagtcagttgaaaaggccaagaggaagctcagaggtctcatcgctgagaagaactgtgctccactcatgctccgtttagcgtggcactcagctggaacttttgatgttaagaccaagaccggaggtccattcggaaccatgaagcatcctgctgagctcgcacatgctgctaacaacggcctagatatcgccgtcagacttctcgagccgatcaaggagcagttccctaacctcacctacgctgacttctatcagcttgctggtgtcgttgccgttgagattactggtggacctgaaattcccttccattcccggaagagaggacaagcctcaccctccccctgagggccgtcttcctggatgctcccagggttctgatcacttganggcaggggttagt

SEQ ID NO: 3185 - DNA, 385 bp, Gossypium hirsutum
  unsure (1)..(385): unsure at all n locations; Clone ID: LIB3493-013-P1-M1-B5
gtcagctgccaaattgaagaaagctttgaagagcatgaaggggctgccattaaagataaagctcgatactaaagtggaagcaaaaatgggagcattgaagacaccaaaggttgggataagggttgtttgtgaagggattaaagctactgccccgaaggcaaaatcagcaaccacagcnncaacttctaatgcaaaatgtaaggttgatttgagacttaagatctggaaatggactntctgatcgacgagaatattttgagaaagagaaacaatggagaagaaaaaggtccgttgtttattttattttattaccttttgttattgtttttttctttctatattacaaagttgtgtcgttattttcctagggaggnaatatttttgc

SEQ ID NO: 3186 - DNA, 452 bp, Gossypium hirsutum
  unsure (1)..(452): unsure at all n locations; Clone ID: LIB3493-013-P1-M1-B6
atgataatgttttgattgcaaaacttgtaagtttcatattgaatattttccatgttttggtccgatgaagtttttagcaataatgctagaaactgctttaaaacaaaaggttttggtgggttattgtgggtagaatagtctccgagaacaccatgatgaatttttttttcctttanttggtggcagcatttccactgattttagacagattattaggaatatttctttgtcaatagatagaatggtactttagagatattaattgttgcagggacccgcagctcctattagttctgttgacatcgtgtatgttaaattcatgttgctctggctcctcatttttaattgagtacctatgtttagtacccgtatcaaatgcatatgtggaaaatggatacaaccctntagggaccttccaattatatagaaaaaaaatactggaaaaaaataaa

SEQ ID NO: 3187 - DNA, 294 bp, Gossypium hirsutum
  Clone ID: LIB3493-013-P1-M1-B7
gggatttcttccggtgcaaagagcagcagccatggttctcaagacagagctttgccgatttagtggtgccaagatataccctgggaaaggcatcagatttgttcgtggtgattcccaggtcttcctctgttccaattcaaaatgcaagaggtacttccacaaccgcctgaagccatcaaaacttacatggacggccatgtacaggaagcaacacaagaaggacattgcccaagaagctgtgaagaagaggagacgtactgcaaagaagccatactccaaatccattgtgggtgc

SEQ ID NO: 3188 - DNA, 403 bp, Gossypium hirsutum
  Clone ID: LIB3493-013-P1-M1-B8
accaactaccacttcatggatacagaattgcgacctgatgttaactactcttatgcatctcacaaggcagtggatgagtacaaggaagctaaggcgcttggagttaacacagtcccggtccttatcggccctgtctcatacttgttgctctctaaacctgcaaagggtgttgagaagaccttttctcttctctccctcctccccaaaatcctccctatctacaaggaagttatatctgagcttaaggcagctggtgcttcctggattcagtttgatgaaccgacccttgtcttggatcttgactctcacaaattgcaagcattcactgctgcttatgatgatttggaatccactctctctggctttgatgtattgatcgagacctacttttgctgatcttact

SEQ ID NO: 3189 - DNA, 343 bp, Gossypium hirsutum
  unsure (1)..(343): unsure at all n locations; Clone ID: LIB3493-013-P1-M1-B9
ccatctcatctcttgaatatttcagaaaaaaaggaagagtctaaacaatataaatcttatttagctataagattgctagtagcattgtcataagtttaaggtaaatagaaatgaaacatccaaagacctaaacatagaaatnnaagacaacttatcattttgacatcttagcanccagtttttttacaagcttagcagcaaccattgcggtcattccgtcgacggtgtcacgttgtggattgaactctactacatcggcagcaaccagatttccttcaagattgtgtaggatattgagaacatcacgaaaggaaaggccccccggttcgattttatgttcccc

SEQ ID NO: 3190 - DNA, 390 bp, Gossypium hirsutum
  unsure (1)..(390): unsure at all n locations; Clone ID: LIB3493-013-P1-M1-C1
ccgcttctctagaggtctggtctactcaacactctctcctccctcttagcaaccaaagactcagatccgctcggatttctttgtcccagaactagaatggagacctttctattcacatcagagtccgtaaacgagggacaccctgacaagctttgcgaccaggtctctgatgctgttctcgatgcctgccttgcccaggaccctgacagcaaggttgcctgtgaaacatgcacgaagactaacatggtcatggtctttggagagattaccaccaaagccaacgtagactatgaagaggattggtcgtgatacatgccgctcccattggatntgttctggatgatgttggtcttgatgctgacaatttgcaaggggctggttaacattgag

SEQ ID NO: 3191 - DNA, 367 bp, Gossypium hirsutum
  unsure (1)..(367): unsure at all n locations; Clone ID: LIB3493-013-P1-M1-C10
cccacgcgtgcgcttggatagtttatggcatggcatccaaagatcatagcatgtgggaattcggttgcagcttttgcaatggccgggtgattccttacaggaccagctgtcatggctgctgcttccattgctgttggtcttaaaggcgttctcttacacgttgccattgtccaggcagctctcccacaaggaattgtcccttttgtctttgccaangaatacaacgtacaccctgatattctcaacacagctgtaatttttgggatgctaatagctttgcccataacgctagtgtactacattttattgggtatatgaagtgggggcatgaccggtatcaaagaatttatggcatcacctcaaaaat

SEQ ID NO: 3192 - DNA, 411 bp, Gossypium hirsutum
  unsure (1)..(411): unsure at all n locations; Clone ID: LIB3493-013-P1-M1-C11
cattttctcagttgttctcaacttccaaacatcaaatggccataacatcacacgtttactcgccaagcacccttctttatccaccttcaaccattacctcactctcacccatttggctcaagagatcaaccgccgcactaccatcactgttctcgccttagacaacgccgccatgtcctctctcttgaataaaaacccttccatttacaccatgaagaacatcctttccctccatgttcttcttgactacttcggtgccaagaagcttcaccagataaccaatggcaccgcactcgccgctactatgttccaagccactggggtcgcccctggggtttccggctttgttaacataaccgattttaaaggnggaaaaattggttgtggagcttaagaccaatggggggattt

SEQ ID NO: 3193 - DNA, 373 bp, Gossypium hirsutum
  unsure (1)..(373): unsure at all n locations; Clone ID: LIB3493-013-P1-M1-C12
gagatggcgtctgtaataaaatctgcaatcttaattctgtcggtgtttttatctgtacgcttcagttcgggtgttaggttgctccaggaacagcccaatgatgaccccaaaaacatggacgctattcctcccattgatgcactcaaccctaccgagttgaatggacccggtgttggcattcacgaagatcatgttgtcccaaaaggngctgaaattggtactcttggttttggttttgaaggtggtcctgataaatgttgttcttctggatgttccggtaattgtaatccctggggtttcgttctaccatttcctcaaattccagaaatcccaagaattccagaaatcccacaaatcccacagatnccacaaa

SEQ ID NO: 3194 - DNA, 410 bp, Gossypium hirsutum
  Clone ID: LIB3493-013-P1-M1-C2
ctcgttcttctccctcgtgcctttcccccttctcattacgatgttttgggattaaagacatattgttcaatggaagaagtgaaagaggcgtacgagaatcttgaatccaaatggaattcaggactggaaattcctactaccactgaatttatcaagattcggtatgcttatgagcttttgacaaatcccatatggaaaaggaattatgatgtatttggaattaatgagcaagatcatgttctggaaaaactcagccaacaatatgcagggggaaaagttctctaacatagcactcccattactgcgtactggttgcttctgatactggagatgatgctttttaatgttattacttccacaaggagtttcagtcctatgtttcaaggattccaaaccccatggtactttca

SEQ ID NO: 3195 - DNA, 353 bp, Gossypium hirsutum
  unsure (1)..(353): unsure at all n locations; Clone ID: LIB3493-013-P1-M1-C3
atagcagcttagtccaacagtccaactccacacccaccaccattggctgtttctgatcatccgaaaaagaatggtgaccgtggaagaagttcgtaaggctcaacgtgcccaaggccctgccaccgtgttggccatcggcacatcaaccccgcctaattgtgttgatcagagcacataccctgactactatttccgtatcacaaatagngagcacaagaccgagttgaaagagaagttcaagcgcatgtgtgaaaaatcgatgatcaagaagcgatacatgtaccttacagaagagattttgaaagagaatcccaatgtatgtgaatacatggctccttcactggatgctaggc

SEQ ID NO: 3196 - DNA, 494 bp, Gossypium hirsutum
  unsure (1)..(494): unsure at all n locations; Clone ID: LIB3493-013-P1-M1-C4
ccgcaggttcggcccacgcctacgccagctgataccatcaacaactgtacgatgctggcatcatctatgcacatgctaatgttcttggcatggcttctccggtcttaagaggcatgttgaaacgagcaaaaggctttggtaaaaagagatcaatttccatccatggtgttcaccaagatgcagttcgggttttcatccgattcttgtactcttccagatatgaatatgaagaaatgaaggagtttatggtgccattgttggtgctgtcacacgcatatgctgtgtcttcattgaagcgagtttgtgaacaacaactggagcatggattgcttaatctagaaaacgtagttgatattttccagctttcattactctgtaatgcgcctcggcttacactgattagtcaccgaatggatctaagtaattncaaaggctgctncgcaactgaaggatggaaatcaatgaggaacagtcatccaggacttgaaaaagag

SEQ ID NO: 3197 - DNA, 177 bp, Gossypium hirsutum
  Clone ID: LIB3493-013-P1-M1-C5
cttggtctgtttatggcattgcaaccaaagatcatagcatgtgggaatgtaagagaaacatattgcaatggcctgggcgatatatcccaagtgtccaaaataaaaaaaatacaattcttctttatttgctttcaaagtggctattgacgcggctatagtgtgcatgcggcttttcca

SEQ ID NO: 3198 - DNA, 310 bp, Gossypium hirsutum
  unsure (1)..(310): unsure at all n locations; Clone ID: LIB3493-013-P1-M1-C7
atcggactgtagttgaccagctacttgatgtgtacaaacaagttaagataggggacccattagaaaagggtaccttgcttgggccattgcacacttcttcttcaaggaagaactttgagaaaggaatagagataattaagtcacaggggggaaagattcttactggtggcggnataatagagtctgaggggaactttgtgcagcccacaattgttgagatttctccagatgccaatgttgttaaagaagagctgtttgcaccagttctttatgtcatgaaatttaagactttgaaagaagcaattgaaat

SEQ ID NO: 3199 - DNA, 104 bp, Gossypium hirsutum
  Clone ID: LIB3493-013-P1-M1-C8
cccacgcgttcgagagtctacagaagcagcagtagctgcagcagcagaagaagaagttaaagccgaagccgaagccgccccaatggaagcacccaaagaggaag

SEQ ID NO: 3200 - DNA, 426 bp, Gossypium hirsutum
  Clone ID: LIB3493-013-P1-M1-C9
atacacgcgtccgaatttgatctttctcttccaaaatcaattccaaaaagagagaaaatcccaccaaaaaaatggcgaattctaatgacaacaacaacgacgagcaccatgaatcgagtcctcttttgagcaaacaagtggcagaccaagatttgaaggaaaaacctagtggtaaaaaggcaaaagaagctgccgccgaggtgccagctcatccggtagttgctaccggagatgggtttgggtggacggctgatgggttgccgttggtccaccggagtgtcgtcggagaacccttgggtcgatctcaatggaactcatctctccttgcttgtcttggccgtaacgatgaattttgcagcagcgacaattgaagtctgtctcccatggaagcttggctccctgtgtgctatattggggaccatgtcg

SEQ ID NO: 3201 - DNA, 140 bp, Gossypium hirsutum
  Clone ID: LIB3493-013-P1-M1-D1
cggactcccaggtccgacccacccgtccgggacataattcccctcttggagaagactactcagttaagagctccattgcttataattgcggaggatgttaccggagaggctcttgctacacttgtagtgaacaaactccg

SEQ ID NO: 3202 - DNA, 407 bp, Gossypium hirsutum
  Clone ID: LIB3493-013-P1-M1-D10
cccacgcgtccgctcctctccataaatctctctctcaacgcagagcgaataggcggagacttccaagaatctatcgcatcagctaatcacgctccaaagaatggatcaggttcaacacccatctgtcatgcagaaggtagcaggccagctccttcgttctagccattctcaagattttcaaggttataatgggtctttcaggagtcctgctctataccaaaggcgtgctgcatatggcaattactccaatgctgcactgcagtatcctgtccgggcttgtggagacctgtctatggttccatcaacagcttcagctatttgcgttcaagcccctgctgagaaaggatttgccagctttgccattgatttcctcaatgggtagagttctgctgctgatcaaaaacagc

SEQ ID NO: 3203 - DNA, 412 bp, Gossypium hirsutum
  unsure (1)..(412): unsure at all n locations; Clone ID: LIB3493-013-P1-M1-D11
gaaaaagcagtccaaggcgttgaaggttgcttgcaatctgaacgatgctgcttgcaaattgaaactaaaggactacaagcaggctgagaagttgtgcaccaaggttttagaattagaaagtgcaaacgtaaaagcactgtatagaagggctcaagcatacatcaatctggcagatttggatttggcggagcttgatatcaagaaagctcttgagcttgaccccgataatagggaggtgaagctcgaatacaaagctttgaaagagaagatcaaggaatataacaagaaggaagccaaattctatggcaacatgtttgccaagatgaataaaatggattctggtgattccagtaaatcagctgcaaaggaacccgaaccaatgagcatagatagcaaggcatangtggagatg

SEQ ID NO: 3204 - DNA, 467 bp, Gossypium hirsutum
  unsure (1)..(467): unsure at all n locations; Clone ID: LIB3493-013-P1-M1-D12
tggggaagttagatcttaagcctggccaaaaggtcctagatgttggctgtggcattggtggaggtgacatttatatggctgaggaatttgatgttcatgttgtgggcaacgacctctctgtaaacatgatatcctttgctcttgaacgagctactggactgaaatgctcantggaatttgaagttgctgattgcaccaagaaggtttatccggacaacagttttgatgttatctacagccgtgacactattctacacattcatgacaaacctgcactgtttagatctttctacaaatggttgaagccaggaggcaaactcctcataagtgattactgcaaaagttccaagactccatccagggagtntgctgagtatatcaagcagagaggctatgatcttcatgatgnnaaancatatggacagatgcttgaggatgctgtttttgtgtgatcttgccaaggatcg

SEQ ID NO: 3205 - DNA, 259 bp, Gossypium hirsutum
  Clone ID: LIB3493-013-P1-M1-D3
cccgtctctgtttggctcccattcctttcttcaactatcttttctcttcaaagatttcaactcttttctcagaatgggaagtaccgatgggaccagctatggtgcttacacctatgatgccctggagagggagccttactggccatcccagaaacttcgaattttcatcaccggggctgggggcttcattgctttgcacatcgctcgacgtctaaagagcgaaggacattacatcattgcttctggttgggagaagaat

SEQ ID NO: 3206 - DNA, 445 bp, Gossypium hirsutum
  unsure (1)..(445): unsure at all n locations; Clone ID: LIB3493-013-P1-M1-D5
tgattacaccatacggcaatatggtaaaccaaagacgggtcaactccttacttttgcccacttctaattgacaacctccgccaatagcaccaccgacgacgaggacagcaaaaatgtcgaaacaggatttacgacactactccgtaccctactcacgtctctctccaaaccctaaccatcaaaacgtcgtctttntacccgtctattacccccgccataacgataactaccgttgnctncgacactgnctngccttcacctccgtcatactcctcctgtctgcagccctattcttgctttaccccttccgatccaactctcgaactcgcccgactccaactcaaacacgtaggagtcaacacgtcgcccaaactcacactcgaccctctcattttttgtgaccattcagggtccgtaacaagggactttttttctttggactatg

SEQ ID NO: 3207 - DNA, 196 bp, Gossypium hirsutum
  Clone ID: LIB3493-013-P1-M1-D6
ctacggaggaaacatgttaggcggtcctcaatcaagcatatctggaatgtctggacccagacagatgcatccacggtctgctagtctttctatgctgggcccaaatcttaaccaggggtacattagttcgatgccaaggaattctattggggccctggggcctcccaaaatgatgcccgggatgaaccaccttttc

SEQ ID NO: 3208 - DNA, 362 bp, Gossypium hirsutum
  unsure (1)..(362): unsure at all n locations; Clone ID: LIB3493-013-P1-M1-D7
ggcgtctgtaataaaatctgcaatcttaattctgtcggtgtttttatctgtacgcttcagttcgggtgttaggttgctccaggaacagcccaatgatgaccccaaaaacatggacgctattcctcccattgatgcactcaaccctaccgagttgaatggacccggtgttggcattcacgaagatcatgttgtcccaaaaggtgctnaaattggtactcttggttttggntttgaaggtggtcctgataaatgttgttcttctggatgttccggtaattgtaatccctggtggttcgttctaccatttcctcaaattccagaaatcccaagaattccagaaatcccacaaatcccacagatcc

SEQ ID NO: 3209 - DNA, 471 bp, Gossypium hirsutum
  unsure (1)..(471): unsure at all n locations; Clone ID: LIB3493-013-P1-M1-D8
gaagagggataggcagcttactatgcagacaggccttgactggaccaagtatgtctatggactgcttaaaacaggcggaatgctttgagtaagacggttctatatatctaactgtgagaaacggattgcaatgcagcttgagcaagcaacactggaagatctactgatacctaatctgttctgacctatggaaacactatataangnntactgtgtgcaggaaattcttgcacattttattgcaacggaccagatcataggtggagcctctccatctgtggctgatgatgctgataccaccgcctcaccttcattaacaccagtgacactgtagccaagctaattgatgggtaccttgcacaggnngcctctgatgttaatttgaagctccccaagtttcaggctctngctgctattgttcctgactactccaggccgctggatgatggtctgtttcgtgcagtagacatt

SEQ ID NO: 3210 - DNA, 375 bp, Gossypium hirsutum
  Clone ID: LIB3493-013-P1-M1-D9
cggacgcgtgggtttttctccagctacagctgtaggcaaaaatgaagataggattctgtatttttggataggaagttttatcatcatgaaaaaaacttgattcagttagatagcagccaggtgctaagggatagagatgatattgactggaaccaagttggttatgatgttctaactcaagtgggtctgccagaggacacccttgtgaagattgtcaaagaagaagaagaaccaacagaatttcttgagttgctgaggacattttagctctgctgcaattaaggagaaacctacaagccaatagattttataaatcatcttcccgtttcttcaaatggcttaattttgctctggaatttcaggcatcaagcctag

SEQ ID NO: 3211 - DNA, 216 bp, Gossypium hirsutum
  Clone ID: LIB3493-013-P1-M1-E1
cttccgccaattaaaccttggattattcacaccgaaccatggaaacccacctttttgccccgggttttcttctcaattttttcctaacccaaaggctgaaccccaaatgggacatccaagaccatgggtcaaacctgcaaggggtccatgtttacagggcatgctcacccttcaaaccctcaaaaccactctcatgggaagaggatgtgctgcaaa

SEQ ID NO: 3212 - DNA, 293 bp, Gossypium hirsutum
  unsure (1)..(293): unsure at all n locations; Clone ID: LIB3493-013-P1-M1-E10
tcgctggtcctaaaccgatcgatggtttgtgggcgccatggtggtataaaagtgtgcataactcaacacattttgcatccccaagaaagtaccctaggccatttcctttctcattttatgacttgttggagcaaagtctacctttctataacttgctaaagcgcaacgtgaggcanacatcttcccttttaaggtctcccttaccggnncccgatctttcatttcctgagaatgcnaagctgattgcttgggttggagatgagattgcccctcgtgagagtgcaaagggttca

SEQ ID NO: 3213 - DNA, 446 bp, Gossypium hirsutum
  unsure (1)..(446): unsure at all n locations; Clone ID: LIB3493-013-P1-M1-E11
gcgttatcactacctgatcaagtagatgaagctgagaaatacataaagaggctgcaaacaaagatgaaggaattcagggagagaaaggaaagcctaatgggaagaacgagatcctacaaatgcacccacagtaatgatagtactaaacctgctgaaattaggattaacgaaaagggttcagctatggaggtggctttgatgacagggcccggcagtcagtacatgttttatgagatgatccgcatatttcatgaagatggagctcatgtactgaacgccaatttctgggttgttgggaatacaattttccacatcgttcatgctgagattggagaattttgtgtagcgaaaataataaaggagaaattgaacaagtttgtgaatgaagnacaggtgcanaggaagaagaacttggacaangagctatattgggactacgaaatccc

SEQ ID NO: 3214 - DNA, 249 bp, Gossypium hirsutum
  Clone ID: LIB3493-013-P1-M1-E12
atttttgctgggaaacaactggaagacggaaggactttggctgattacaatattcaaaaggagtccactcttcaccttgttcttcgtcttcgtggtgggttctaagccttaaggtctcccttaatgtgggttttctggttttacgtgaaggattgtgccctgtaatggccttttaaataatttctagtctttgtttaccggttgcatctatgtatggtttctctttgaatggaatttgcatatttacct

SEQ ID NO: 3215 - DNA, 430 bp, Gossypium hirsutum
  Clone ID: LIB3493-013-P1-M1-E5
atgcgttctgtttgcttttaaacaacccaaagatcagaccttatgtaaaaaaaaaaaaaaaagaaccaaaacgctaaaaatggaatcatctggacgttcaaggaggccttgtttcattgaagaagataatgggttggcttctcttgcagttatggagtctgggtatgcaggaatccattgccaaactcataagcaaaatggatttttttcaagacctctttgttactcaaggagaagtagtttgaggaatctgtcatcatcatcatcttcatctttttattggtcttcggtttcttctccaaggtcttggtaggtttgtgatgccagatttgaagaccatatgccccatttcttggatgctggtttcctttgcaagaagcctattgggggaacagagacatcttcatgtacagaggggacacaccttttt

SEQ ID NO: 3216 - DNA, 175 bp, Gossypium hirsutum
  Clone ID: LIB3493-013-P1-M1-E6
aatcccagtttcggacccagacccacgcagtagcgataccactacctgatcaagtagaatgaagcatgagaaatgcagacagaggctggaaacaaagatggaagatatctatgtggtgaacgagaaagcctaaatgggaaagaacgaagatgcgtcagacgcactcacagaaacg

SEQ ID NO: 3217 - DNA, 379 bp, Gossypium hirsutum
  unsure (1)..(379): unsure at all n locations; Clone ID: LIB3493-013-P1-M1-E7
cggacgcgtgggcggacgcgtgggtttttattgaatttttttttgcttttacacatccccaacagttcatcccactttctctctctctcttttcatctatctatgctttcacaatcacctaaccgggagacaggcagccacccccccccccccccaactctcgcccttgactnnttcccctctcttcaataattctctcttttggggtactatatatgttacatgttgctgaactccatggganaaatattccttttctttcttccccattcttcccctctctatccatccatttcttctcttcttttttttttcctcagtttcaaaattaacttctttgagctttggggaataagccaaaatctggnngtgtgtgttt

SEQ ID NO: 3218 - DNA, 494 bp, Gossypium hirsutum
  unsure (1)..(494): unsure at all n locations; Clone ID: LIB3493-013-P1-M1-E8
gcgtttgacgatgtcgggaggcttgttcatattgattttggtttcatcttggaaacatcacctggtggaaatatgcggttcgagagtgcacatttcaagttgagccatgagatgactcaattactagatccatcgggagttatgaaaagtgaaacctgggacaactttgtaagctngngtgtgaagggataccttgccgctcgccgacatatgaatgggatcatcaacactgngctgcttatgcttgacagtggattgccttgtttcagcaggggtgatcccattggaaatcttcgcaagagatttcatcctgagatgagcgagcgtgaggccgccaatttcatgaaaaatgtctgcaccgatgcttacaacangtggacaactgctggctatgacctaatacagtatctgcngcnnggcattgagaagtagaggcacgggtaattatcctttggtgtacattatcgtttgtaattgataaatattcttttacc

SEQ ID NO: 3219 - DNA, 303 bp, Gossypium hirsutum
  Clone ID: LIB3493-013-P1-M1-E9
acgagagaacataaggtgaagaatagaggcggcaactgaattggagataaggtgagctcggtgagtagaacgtattaagatcgcgaagagcatttgaccggcaagaagaaaggattcaaagcgggtgttgaaggaactcacggatttgcagaaagatccacccacttgttggagtgctggtccagtagctgaagacatgtttcattggcaagcaacaatcatgggaccctcagatagcccttatgctggagggtgtttttagatactatccatttccctccagattatcctttcaagcctcct

SEQ ID NO: 3220 - DNA, 445 bp, Gossypium hirsutum
  unsure (1)..(445): unsure at all n locations; Clone ID: LIB3493-013-P1-M1-F1
acgagagaacataaggtgaaagatgaaagcagcaactggagctggaggaaaatgggtgaagctccggtcgagctagaacagaatctaagatccggaaaggaacaattgaccggacaagaagaaaacattttaaaaaggtgtagaaggtactcactgaatcatataaaggatcacgcacttgttggagtgcggttgcgtgggctgcagacatggtagctggataagcaactaatgtggaacctttatagaggagctgacataatacgtgggattttggaaactagggaattccctagattcgagtgttgaccatattcttgcgttagacggaactcggatgcaaagtgaattagcaaatataatagtgaagaaatatcggcatgatcccttggagatgagacttatctctaaacatttntaatttagaagaagttttgatgattca

SEQ ID NO: 3221 - DNA, 360 bp, Gossypium hirsutum
  Clone ID: LIB3493-013-P1-M1-F10
attttgttgtgggatttggctgaaggaaagaagctttacagtcttgatgctggttctgttattcattcgctttgctttagccccaacaggtactggctttgtgctgccactgagcagagcatcaagatctgggatctggaaagtaagagtattgtggaagacttgaaggttgatctcaaagctgaggctgagaaatctgatgtcaccgacaatgcaaacaagaagaaggtgatatactgcacaagcttgaactggagtgcagatggaagcaccttatttagtggttatacagatggtgtaatcagagtttggggaattggtcgatactaagaccaacattcatgcatgcatgttgtgcct

SEQ ID NO: 3222 - DNA, 359 bp, Gossypium hirsutum
  Clone ID: LIB3493-013-P1-M1-F11
ccgattaaagccatcatcggcccgaagagctttacagcccaaaatcttatttccgggaaatccaccgataatcgacgaactctctctcgatctcacctaagattcgccgataatcgaaattttaaaaataacccgacaacaacaaagatgaagaaagaagacacagtgaaactcattagcgctgaaggaatggaattcgttatagacaaagaagctgctatggtttctcaaacaatccgtaacatgcttacttctccaggtggtttcgctgaggcggagcatgtgggagtgactttcccggagataagtgctgtgattcttgagaagatattgcaagatttttattggctcttcaatat

SEQ ID NO: 3223 - DNA, 412 bp, Gossypium hirsutum
  unsure (1)..(412): unsure at all n locations; Clone ID: LIB3493-013-P1-M1-F12
gggaggaggaactggatctggaatgggaacgcttttgatatcgaagataagggaagaatacccagataggatgatgttgaccttctctgttttcccatctcctaaggtctctgataccgtcgtggagccttacaatgctactttgtcagttcatcagttggttgaaaacgctgatgagtgtatggtcctcgataatgaggccttgtatgatatttgtttcaggacacttaagctcaccactcccagctttggtgatctgaatcacctgatatctgcaacaatgtnctgggttacatgctgcttacgattccctggtcagctcaactttgatctgaggaaaccttgctgtgaatctcatcccatttcctcggcttcatttctttatgggtgggtttgctccactcacttcaag

SEQ ID NO: 3224 - DNA, 350 bp, Gossypium hirsutum
  unsure (1)..(350): unsure at all n locations; Clone ID: LIB3493-013-P1-M1-F2
gtccggcagctggataatgcagttttggtttttgattggatcatctatctcggccgcgagacaaggatgaattcagtggaaggtttactgactcaaatccgggggctatcaagcaccgcctccgatgttttatccctacaaaatgtgcttaaacaagctgatgagtccctccatgccaagtccactcggttgttgccttttctcgaccaactcgacccttccaaacactctctgggttacctctatttcctagaggcttgcactgctggtccagttacaacagaatcagctagttcatttgtgttaatcattgccagatttatcagntcatgtgttgctgagcaaatacg

SEQ ID NO: 3225 - DNA, 330 bp, Gossypium hirsutum
  Clone ID: LIB3493-013-P1-M1-F3
acgcagacgcgtgggttacttggtgaagaggccatgaatatcagttagactggccgaaatgagagatagagaaagaattctgaggctaaatcgacttcatggcttgagtgcttgacggcggtagcaatatgttatgcgaaaccataagaaaaagggctgatagcatagttttttttaggctaaaagtttgctgcgttttggaagaaaaacgattaaaagagggagtgtaacagccaacaaaacgacgccgcacagggggaggaaccaaggtccgcgtgttaacccggctggggccccgaattggtgcctttgcgcctataatggtttatt

SEQ ID NO: 3226 - DNA, 308 bp, Gossypium hirsutum
  unsure (1)..(308): unsure at all n locations; Clone ID: LIB3493-013-P1-M1-F4
gngactgtcaggtcagcttcccattgccattggtaacttaactcagctccaaactctttctcttcgtttcaatgctctgtctgggtcaatcccatccgactttgccaagcttaccacccttcgaaacctttacttacaagggaatgggttttcgggtcagatcccgggattcttgttcactttgcaaaacctcattcggttaaatcttgcaaacaataatttcagtggtaccatcccctgaaagtgtcaataattcgactaggttgggcacattgtttttagagaacaatcacttatctgggtcaata

SEQ ID NO: 3227 - DNA, 419 bp, Gossypium hirsutum
  unsure (1)..(419): unsure at all n locations; Clone ID: LIB3493-013-P1-M1-F5
gctttgaaagatttatacaagtcattcgtagccgagtatccgattgtgtcaattgaagatccatttgaccaagatgattgggagcactactccaaactaaccaatgaaatcggagaaaaagttcagattgtaggagatgatcttttggtcactaacccaaagagggttgcgaaggctattgctgaaaaaacttgcaatgcccttcttctcaaggtcaatcaaattggatctgttactgaaagtatttgagctgtgaaaatgtccaagcaagcttgatatgggtgtgtggccaggccaccgcagggtgaaaacggaggatactnttaatggctgttctttcaatcggttgccacgggccaaattaagactggagctcattgcaggtttgagcgtttngccagtacaatcagcttctgcga

SEQ ID NO: 3228 - DNA, 411 bp, Gossypium hirsutum
  unsure (1)..(411): unsure at all n locations; Clone ID: LIB3493-013-P1-M1-F6
caaactttatcttttgatttggttgatccatagatctgctaattccaattccatgctcgcatgaagttttttccttttctgtttccagatcctcttcttcaagtttaaaccaaagtggtcaaactacaagtactatttacattatcttgttgagaagcaaaggaggatacggcttcgttgttcaagtttctaaggtttggttgtatatagggcacatttagatgtggagagaacntnggaggggtttctggatgagaatgaagggaggtattcttggtttatgaactttttgagggcctgttttcggccaaagtcagatcaatacagtcacacaagtttggatacccggggtcgccaagatgggcttttgtggacaaggacacagggcagcacgtctnatggggagttctc

SEQ ID NO: 3229 - DNA, 466 bp, Gossypium hirsutum
  unsure (1)..(466): unsure at all n locations; Clone ID: LIB3493-013-P1-M1-F7
aaaaaaagagagatggcgtctgtaataaaatctgcaatcttaattctgtcggtgtttttatctgtacgcttcagttcgggtgttaggttgctccaggaacagcccaatgatgaccccaaaaacatggacgctattcctcccattgatgcactcaaccctaccgagacggatggacccnntgttggcattcaccaagatcatgttgncccaaaaggtgctgaaattggtactctnggntncggttttgaaggaggtcctgataaatgttgatcttctggatgttccggtaattgtaatccctggtggttcgttctaccatttcctcaaattccagaaatcccaagaattccagaaatcccacaaatccgncngtttccacagattgcacaaattccactattcccacagatcccacannncccacagatcccacaagtcccaaaaatcccactaatgccaggacagt

SEQ ID NO: 3230 - DNA, 184 bp, Gossypium hirsutum
  Clone ID: LIB3493-013-P1-M1-F8
ctgcccggcattacggggggacgacccacgcgtacgcagacgcgtgggttacttggtgaagaggccatgaatatcactttgcttggctgaaatgggagaaagagaacgaattgcgagggtaaatcgactggatgggtggaccgcgtgactgcggtaacaatctagaatgcgaaaccataagaaa

SEQ ID NO: 3231 - DNA, 416 bp, Gossypium hirsutum
  unsure (1)..(416): unsure at all n locations; Clone ID: LIB3493-013-P1-M1-F9
ctcatagtgataagagatttgccgggttctccaaggatagtaagcagcttgatgctgaagttcaccgcaaatacatttacggtggtcacgtagcctcatatatgaggattttgatggaagacgagccagaaaagtatcagtctcacttcagcgagtatattaagagaggaatcgaagcanataacatcgagtccttgtacaagaaggttcacgctgctatccgtgccgatccctctgcaaagaagtctgaaaaggctcctcctaagcaacacaagaggttcaacttgaagaagctgacgtacgaggaaaggaaagctaagttgattgatcgattacacacccttaatgctgctgccggtgcggattccgaagaccaggacttaacgtaggatgcttgatcgtaaaatactgaactg

SEQ ID NO: 3232 - DNA, 374 bp, Gossypium hirsutum
  unsure (1)..(374): unsure at all n locations; Clone ID: LIB3493-013-P1-M1-G1
gaaagttttaaggatcaaaacgaaatcatatgtcttgttaatggattcttttggttgaacagtccgaaacccatttccagaaaaaaaaaaaaaaagaatcaagaaaacaccgagtggggttttcttggttttgatttgtatacttggatttgcaaggaaaagatttttggttgaggttcaatggagggtgagaaaagatacattanngcggaagagctgaaagagcataacaaatctggggatttggggatctcaatccagggcaaggtttacgatgtttcacagtgggcaaaggagcatcccggtggggaaatcccgcttttgaatctggccggcccagatgttaccgatgcgtttctggcgtatcaccctgg

SEQ ID NO: 3233 - DNA, 398 bp, Gossypium hirsutum
  Clone ID: LIB3493-013-P1-M1-G10
aaaaaaaaaaactaaaaatccagcagtgaggtgcagggaaacagaactcaaaatggcgacagttccaggacagttgatttgggaggtagtgaagaagaacaattgttttttggtgaaacaatttggaagaggaactgctggcgttcgattcagcaaagagcccaacaatctctacaatgtcaactcttacaaacactctggtttggcaaacaagaaaactgtcaccattcaacctgcaggcaaagaccagtctgtactcttagccacaaccaagtctaagaaacagaacaagccttcgagcttgctccataagtctgtcatgaaaaaggagttccctaggatggccaaggcagtcaaaaaccaggtgacagacaactactacaggcctggtttaacaa

SEQ ID NO: 3234 - DNA, 460 bp, Gossypium hirsutum
  unsure (1)..(460): unsure at all n locations; Clone ID: LIB3493-013-P1-M1-G11
aaaagaatggcatatgaagggattctgttggggatgggtaatcctctccttgacatttcgttagtcgtggacgaagagttcttgaaaaaatatgatatcaagttgaacaatgcaattttagctgaggagaaacaccttcccatgtatcaagaaatggcatccaagcccaatgtanagtatattgctggaggtgctactcaaaattcaatcaaagttgcacagtggatgcttcaaattcctggtgcaactggttacattggctgcattgggaaggacaagtttggggaggaaatgaagaagaactcaaaagctgctggtgttaatgttcaatatctcgaggatgaaactgcaccaacaggaacttgtgctggntgtgttgttggaggngaaggcactcattgcaaatctatcanctnctaactgctataagtctgagcatttgaagaagcctgagaaattt

SEQ ID NO: 3235 - DNA, 398 bp, Gossypium hirsutum
  unsure (1)..(398): unsure at all n locations; Clone ID: LIB3493-013-P1-M1-G12
cggacgcgtgggcagatatggaagaacctcaagcccttcattgagtggctccagactgccgagtctgaatcggaagatgagtgaatcccgaagctcttcgtatggtatcttcactatgttaagcctctacttctagtggcgtcgtcttctattatatgtttgtgtttggctttaccgtgtcgtgtttcctagaataaaagacagtgagctacatcccgtacgtgctctctgctgttctgtggtttattatgttgtgaactggtcattgtttatntcccctaatgtgttaattgagtttatgttttatttctttctagttttttttttcttttttaatggatcttaaaccgcattaagcctggttaacttttcattttttaattaatttttcctggtta

SEQ ID NO: 3236 - DNA, 193 bp, Gossypium hirsutum
  Clone ID: LIB3493-013-P1-M1-G2
gagaaaacaaaaacctcacaggcactgctcgttatgcaagtgttaacactcaccttggaattgagcaaagccgcagagatgatttggaatcccttgggtatgtgcttatgtatttcctgagaggaagccttccctggcaggggctaaaagctggcacgaaaaaacaaaaatatgataagattagcgaaaagaa

SEQ ID NO: 3237 - DNA, 448 bp, Gossypium hirsutum
  Clone ID: LIB3493-013-P1-M1-G4
ggaaaacaaacacgaagcttccaatatgtttctgatttggttgatggactcgttgctttaatggaaggtgagcacataggaccttttaatctcggcaacccgggagaattcaccatgctcgaattagcggaggtcgtcaaagacacgatcgatccaagtgcaacgatagaatataaaccaaacaccgcggacgatccacatatgaggaaaccggacatcagcaaagcaaaggagctgctgaactgggagccgaaaatacccctaagagaagggttaccccttatggtgaacgatttccggaatcgtattttgaatgaagatgaaggaaagggagcttaaaccgaaaaacgaacagatacgggaaacaagtatgtatagtgtgaactgcagctgatttttgccaatcatttcatattataattcctgattatatgatcttgtctacata

SEQ ID NO: 3238 - DNA, 356 bp, Gossypium hirsutum
  Clone ID: LIB3493-013-P1-M1-G5
gagtagggttttctttcccgattcacctcttcattttcttttccgttctctttcttctgataagctatggaatctaatctcgttatcaaggttaagtatggaaatactctaaggcgtttcaatgctcgaattgttgatggtgaacgcctggatcttaatatgactggactaagggcaaaaattatggggcttttcaattttccttttgatactgaacttactctgacatatattgatgaagatgggggatattggtaacccttgttgatgatgatgatttgggtgatgtgatgaggcaacgccttaaattcctgaggattaatgtgcaactaaataatgacaagctcaataaacct

SEQ ID NO: 3239 - DNA, 422 bp, Gossypium hirsutum
  unsure (1)..(422): unsure at all n locations; Clone ID: LIB3493-013-P1-M1-G6
cggacgcgtaggcagcgttgcttgcaatgtcttagcagtgaagataacaagtttatctttgtagctgctgcaaagtattgcgttgatattgcaactcatcagcatggctgttgcgttttgcaacgatgcattagccattcaactggtgagtatcgagataagttggttgaagaaatatccaccaatgggcttctactagcacaggatgcatatggaaattatgttgttcagtttatcttggagttaaaaatcccatctgcccacttcaacttggtttctcaatttcaagggaactatgtacacctctcatcggcaaaagttcagcagtcatgtggttgaaaagtgtcttcgggtattaaatgacgagagccggtcaagaatcatccatgaattgctctctgcaacacactttnnaacggtgc

SEQ ID NO: 3240 - DNA, 52 bp, Gossypium hirsutum
  Clone ID: LIB3493-013-P1-M1-G8
acgaggacgcgtgggcaaacctgaagtgagaagccgcgcacctcgaataatt

SEQ ID NO: 3241 - DNA, 338 bp, Gossypium hirsutum
  Clone ID: LIB3493-013-P1-M1-G9
acccgatcggctgacctacaagaatgcagttggagtgattctggccattccaccattcaattatccagtgaacctggctgtttcaaaaaacgcaccggctctaattgctggaaactcccttgtactcaagccaccgacacagggtgctgtttctgctcttcatatggtacactgctttcatttggctggttttcccaaagggctcattagctgtgtgacggggaaaggctccgagatcggggactttctcaccatgcatcctggagttaactgtataagcttcactggtggagacacacgcatttggatctcaaagaaagcaggaatgatccctctgc

SEQ ID NO: 3242 - DNA, 363 bp, Gossypium hirsutum
  unsure (1)..(363): unsure at all n locations; Clone ID: LIB3493-013-P1-M1-H10
gaaccccagaagatttgaagaagctaagaggtttgggattacagaatttgtgaatccaaaagactacgacaagccagttcaagaggtgattgtggagatgaccggcggaggagtggatcgcagtgtggagtgtacagggagcgtccaagccatgatttccgcttttgaatgcgtccatnanngntggggtgtttgtgtgctggtgggngnnccaaagaaagacgatgcattcaagactnatccaatgaatctactaagtgagaggacccttaagggtgctttttatggcaactataaaccacgcactgatattcccatggttgtcgacaaatatttgaacaaggagctggggctggatatgga

SEQ ID NO: 3243 - DNA, 298 bp, Gossypium hirsutum
  Clone ID: LIB3493-013-P1-M1-H12
cggacgcgtggggaacaaccaatcaaacaggttgcttagaagtcccaagttagagaacatgggtcgtggagtcagcagtggtgggggacagagttctttgggttaccttttcgggagcggagaagctccacctccgaaaccaaccaatgtcacgagtactggcaccaccagtagtgaagttcctcagaagcagattgaggttgtgaaggaaaccgtgcaaaaaccgaccactgcttcaccatcatcgggtgatgctaaggagatccctacaggtgttccagggagcaaaacgaacaac

SEQ ID NO: 3244 - DNA, 366 bp, Gossypium hirsutum
  Clone ID: LIB3493-013-P1-M1-H4
gttccacagctgctgcccggcatcttgcatcaggtggagttgatgtatacactgctctagctggagctgttggagcactatatggtcctcttcatggtggagccaacgaggctgtgctcaagatgcttggtgagattggaacactagagaacattccagagttcattgaaggtgtcaaaaacaggaagcggaaaatgtctggttttggccaccgcgtatacaaaaactatgatccacgggccaaggtgataaagaaattggcagaggaagtttttctattggtgggcgggatccacttattgaggtagctattaatttggagaaggccgcattatctgacgaatattttatcaagaggaagcttta

SEQ ID NO: 3245 - DNA, 413 bp, Gossypium hirsutum
  Clone ID: LIB3493-013-P1-M1-H5
ttttcatgcaggattgattgaagtgagaagcaactgttggaatggaaggtgatatatgttcgggttttggtaatggaggtcaagtggatggcaaggttttgcaaacatttcaaaagagttttgttcaagttcaagacatcctagaccaaaacaggctgctaatcaacgagattaaccaaaaccatgaatcaaagattcctgataacttgagccggaatgtggggttaattaaagagttgaataacaatattagaagagtagctgatctctatgctgacctctccagctctttcaccaggtcgatggaagcttcgtccgaggtgattcggcccgggatgacgaacctgatggaaaagctatcagaagagaaataatctggtaaaacattgtcaactgaactttggataaatatg

SEQ ID NO: 3246 - DNA, 230 bp, Gossypium hirsutum
  Clone ID: LIB3493-013-P1-M1-H6
gctgatttttcttggttagaatatgtctcaaaggcctaacgttccccactcttcttcaatagcttttggtctccattctcatctcctggtttccagggagatgaaccctaattccaactggtcttaatagatccatctctttctttttcttctattgattttttggttaaacttcttttatttcctttttgaaacaaagtaattgccttgttgatttgcaagcaaatttt

SEQ ID NO: 3247 - DNA, 364 bp, Gossypium hirsutum
  unsure (1)..(364): unsure at all n locations; Clone ID: LIB3493-013-P1-M1-H7
caatgaggctgttcaaaaggctgctgctgctttgaagggctctgaccaccgccgtgcaacaaatgttagtgctagactcgatgcccagcagaaaaagcttaacttaccggtccttcccaccacaaccattggatccttccctcaaaccttggaactcaggagagttcgtcgngaattcaaggctaacaagatctctgaggacaattacattaaagccattaaggaggaaattaagaaggttgttgaccttcaagaagagctcgacattgatgtcctggttcacggagagcctgagagaaacgatatggttgagtttttcggggagcagttgtctggttttgctttcactggtaacgggtgggtc

SEQ ID NO: 3248 - DNA, 333 bp, Gossypium hirsutum
  unsure (1)..(333): unsure at all n locations; Clone ID: LIB3493-013-P1-M1-H8
gttgattcctccctcaaaatcgagatattcatgatgagtagagtgaggaattatcttgaagaccagttgttgggatttgcattggtgccactgtctgaagtgctcctcaagaatgggaagttggagaaagaattctctctttcttcaactgatctgttccattcacctgctggntntgtccagttgtctcttgcatatgctggattatctcctgaagtaatcgctattcctgctatgcccagagatgtggctgctgacgaaactgtgaaggattcggaaacaagtgagtgtgagttggaaaagaatgagttcccggatcccataatcgcgaat

SEQ ID NO: 3249 - DNA, 368 bp, Gossypium hirsutum
  Clone ID: LIB3493-014-P1-M1-A1
ctcccaagtatttccaccaccaccctccccttcctaagctacctcctctccctaagattcctcccaagtatttccaccaccatcccaagttcggaaaatggccttctttgccaccctttgctccccatcatccttaagctatcttgcattgttttacgcatttaatgaaggtggttagtgtgaacaagttccccagcagtacctcatgcaataaatgtagcaacaaagaagaagaagaaaattgttaaaattaagagaggaatcgttaatttattatttatatgttttgttaattactttatgatatgaatgtgtgaatttctaattttctgttgcaataaataacagtacattaacttttctttttc

SEQ ID NO: 3250 - DNA, 436 bp, Gossypium hirsutum
  Clone ID: LIB3493-014-P1-M1-A10
caagatccctccattccctaagaagccatgccctccccttcctaagctacctcctcttcccaagattcctcccaagtatttccaccaccaccctccccttcctaagctacctcctctccctaagattcctcccaagtatttccaccaccatcccaagttcggaaaatggccttctttgccaccctttgctccccatcatccttaagctatcttgcattgtttacgcatttaatgaaggtggttagtgtgaacaagttccccagcagtacctcatgcaataaatgtagcaacaaaagaagaagaagaaaattgttaaaattaagagaggaatcgttaatttattatttatatgttttgttaattactttatgatatgaatgtgtgaatttctaattttctgttgcaataaataacagtacattaacttttctttttc

SEQ ID NO: 3251 - DNA, 514 bp, Gossypium hirsutum
  Clone ID: LIB3493-014-P1-M1-A11
ccgccttcaagaattggtcatcattttggacaattactaaaaactggaaagggaactgatgttagctttgaagttgatggggaagtcttttatgcccacaagttggtacttgctgcacgttcgcctgtgtttagggcacaactttttggtcctatgaaggaacagaatacaaagcagataaaagttgaagatattgaagctccggtttttaaggcccccttcactttatgtactgggattctctacctgacatgcaagagctcactggtctcgacttcaagtgggtgactacattgatgtctcagcatctgcttgctgccgcagataggtatggactagaaaggttgcgattgctctgtgagtccaatctttgggaggatgttaccattaacactgcggcaactacattagccttggccgaacagtaccattgttttcagttgaaagctgtgtgtcttaagttcgttgcagtgccagaaaatctaagagctggtatgcaaacagatggtttcgt

SEQ ID NO: 3252 - DNA, 531 bp, Gossypium hirsutum
  Clone ID: LIB3493-014-P1-M1-A12
agacgaccagttgaaatagttgctccattgcaagaaaaaccttctactgctcgagtttcggacatttacttttcaccaaaggaagggttcactttccaggacttgcttgaagccactgacaattttgatgagagctttgttgttggcaggggagcatgtggaactgtatataaagctgtcttacctagtggccatgtcattgctgttaagaagcttgcgccaacagggagggaaataacaatgtcgacaacagcttccgtgccgaaattctaaccctggggaacatccggcatcggaatattgtgaagctttatggtttctgctaccaccaaggttccaatcttctactttatgaatacatgtcaagaggcagtttgggagagctgcttcatggagcatcttgcaatcttgattggagaacaaggttcctgattgctttaggggctgcccaaggtcttgcatatttgcatcattattgcaagcctagaatttttcaccgtgatattaagtccaataacatattgcttgatg

SEQ ID NO: 3253 - DNA, 441 bp, Gossypium hirsutum
  Clone ID: LIB3493-014-P1-M1-A2
cccaatttggagcaaaggccgatgagaaaacagatttgagtcagccattgctgaatgcgtggaaagaagcatgcgcatcgccagctccgtcccaaatagtgattcctgcagggacgttccttttaagtcgagcagccctggaaggtccatgcaagggtcctgtcgatattcaagttcaaggcaccataaaggctccgtctgatcctagtcatttcaaagacgatcctgggttattttcagccgcatcgaagggtttacgatgtccggcggtggtattttcgatggccaaggagcccttgcttggtccaagaacgactgtcataaaaataaaaagtgtactttatttcccattaacataagattcaattttctgacgaacgcctatatacatgacataaccaccaaagacagcaaacaagttaatgttaatgttttgggatg

SEQ ID NO: 3254 - DNA, 422 bp, Gossypium hirsutum
  unsure (1)..(422): unsure at all n locations; Clone ID: LIB3493-014-P1-M1-A3
ggctctttggaccgggattggacccaatatagcacgaaatgctattataaatgctgctgaacttgcaagctacgatcaagtaaagcagacgattttgaaaatccctggattcactgataatgttgtcactcatctcctttctggtcttggagctggattttttgccgtctgtattggttctccagttgatgtggttaagtcaagaatgatgggagattcagcttcaagagcacgctcgattgttttatcaaaactttgaaaaatgatggacctatggctntttacaagggttttatcccgaatttcggacggctaggatcatggaatgtgatcatgtttcttaccttagaacaggcaaagaaaattgtgagagatctagagtcatcttaaggagcttaaaaagaaccaaaatcccacaaagc

SEQ ID NO: 3255 - DNA, 456 bp, Gossypium hirsutum
  Clone ID: LIB3493-014-P1-M1-A4
attaaattttctgagaactacagactgtattctcgcagtcattttgttaaagggctagaagttgtgcttctgttggtggtataccttgcatatgggtataatgatagtgcattgtcgtacattcttctatcaattagcagttggtttatggctctttcatggcttttcgcaccctatttgttcaatccttctggatttgagtggcaaaagattgtggaggacttagagattggacaaattggctattttacagaggcggaattggtgttaagggagaggaaagctgggaagcctggtgggatgaagaactggcacacattcgcaccatgagaggaagaatattggagactattttaagtctcagatttttcctgttccagtatggcgttgtctacaagctaaatgtgcagggaacaaatacgtcgttgacggtttatggcttttcctgggtcgtac

SEQ ID NO: 3256 - DNA, 471 bp, Gossypium hirsutum
  unsure (1)..(471): unsure at all n locations; Clone ID: LIB3493-014-P1-M1-A5
gttccactgtttgagaagcttgcggatctggaggctgcacctgctgctttggctcggctcttctcgatagattggtacagaaatcggatcaatggcaagcaagaagtcatgattgggtattctgattcgggtaaagatgctggtcgtctctctgctgcctggcagttatacaaagctcaagaggagcttatcaatgttgctaaggaatttggtgtgaagctaaccggttccatggtcgtggtggaactgttggaagagggtgtggtcccacccatcttgctatattatctcaaccaccagaaacaattcacggctcacttcgggttacagttcaaggtgaagttattgagcaatcgtttggagaggaacacttgtgctttagaacactnccagcgtttactgctgccacacttgagcatggcatgcacccaccagtttcaccaaaaccagaatggcgtgcactgatggatg

SEQ ID NO: 3257 - DNA, 477 bp, Gossypium hirsutum
  Clone ID: LIB3493-014-P1-M1-A6
aagaacctaagcttcctatttctctctcactcagtcgaatccaagaaaaacactccaactaacattttgcttccatattcggccgaccgatgctacgccaccataactacgatctacatgcccgccgttcgactgcttttcagccttagatcccctctatgcttcgatttcgacaaagcaaaaggaatccacggcatttggtaatgtttttcttttattttcaaatgtttaaaattataatgaaaaagaatttaaggaaatagaatcgaaataaaagcatagaacctagaaaagatgaatctaaaatcaccttttaaaaactgacgttggattggtcttatattttctttacaatatgcgtgtatttctctgggaaaaccgaccccctttacaattgattatctggctttttatagccgaataaagagaaataagaaaaaataaaaaataaaagaaaatacaatggccttgggtttc

SEQ ID NO: 3258 - DNA, 406 bp, Gossypium hirsutum
  Clone ID: LIB3493-014-P1-M1-A7
gcactcttcagatgttgcagggaacaaacatgcagatccggctcttttgaacttgcttaaggactcttttaccaagaccaacttctaaatggcgtttccatatgtagctacttctgaggaggaaacaatggagaatttgttggtttcaacgtttaaggaagcctgtgggcacggcttgggagttgctaatgttgcattcttggaatcgtgctctatgagggtggagatttccagaaacttgcaaacttgcattcggtccatgatcatctatatgtcgaggatggaaaagagaacaaagggggagactgatctggttgttctatgccatggaggctcttaatctctgcaagagcttgtccaaccacttccacaaagtgagatgttgtctgcagttatgagatctgtg

SEQ ID NO: 3259 - DNA, 221 bp, Gossypium hirsutum
  Clone ID: LIB3493-014-P1-M1-A8
gcaaaacctaatgtggtggtcttttgactgggaagaaaaagacaagagaaaattttgccttcaatttccagtgatagaacaacacaacagtgctaggtttagttcatttccttgtatatccccaggcctgtttcatttggctttgcttatttacaaagtatataaaaaagttgcttttttttttttcaaactgatcctagtcatttacaagacgatacagg

SEQ ID NO: 3260 - DNA, 422 bp, Gossypium hirsutum
  Clone ID: LIB3493-014-P1-M1-A9
cggacgcgtggggtcccctgttactcatccagtgggcaactgtgtaaagcgggtggttgagtcgttacgacattgcatgcactaaacggcacacacttcagcaaagtcaccaaattcaccctgtttaaattatagtttgcctccatctactcgtacatgtagagctccaactcatcctgcatgttgtgaaccatccacaaatagtacatatctaatggtagctgctgtcacacgacctccatctgatcttgcttctaaaccttctggaaatgatacattacctaatacttctgctccatcaccatcgggaagcaatccttctattcctgactctaagtcaagtcatcaagcagcaatactagtcggaagcatagggggtggtacatttcttctaatattaataatcattgcctattttttga

SEQ ID NO: 3261 - DNA, 489 bp, Gossypium hirsutum
  Clone ID: LIB3493-014-P1-M1-B1
atcgcttccatctggactcagcaacgatctctccctaacaatccagaacagtgaccgatctgaaggtgcagtgctaaggagattgctgcaagaaacggcaaacacttctgcaaagtcaccaaaagcaccccctttaaattatagtatgcctccatctcctcgtacatctagagctccaactcatcctgcatcttctgaaccatccacaaatagtacatatttaagggtgctcctgttccacgacctccctctgctcctgcttctaaaccttctggaaatgatacagtacctaatacttctgctccatcaccatcgggaagcaatccttctattcctgactctaagtcaagtcatcaagcagcaatactagtcggaagcatagggggtggtacatttcttctaatattaataatcattgcctatctcttgaaaacttacaaggtatctactgtgaaaccttgggccacagggctaagtggacaacttcag

SEQ ID NO: 3262 - DNA, 417 bp, Gossypium hirsutum
  Clone ID: LIB3493-014-P1-M1-B10
atattcacctgctatcgaagctgctgcacgtttgcaacctagatgcagtgagaaggttgaaagagactctggaattgtatcattcacaacccgcttacttgtgccaacctcacgtattggttgccttattggtaaaggaggagctattgtaacagagatgagaaggatcacaaaagctaatatccgtatcctgtcaaaggagaatcttccaaaaattcgtctgaagatgatgagatggttcagattgctggagaccttgatgttgcaaaggatgcccttgtacaaataacaacgcggttaagagcaaatctttttgatagggaaggcgctgttaatgcgttggtgccagttttaccgtatcttcatgtgccaactgaaggaacagacagtttgagttatgaaagtagagagggaaaa

SEQ ID NO: 3263 - DNA, 489 bp, Gossypium hirsutum
  Clone ID: LIB3493-014-P1-M1-B11
cgtggctttcctatcttcatttcttcacactctcctacgggggttgcgggatataaatgacattgtgttttactattaatagctgatactattatactttcttacaatcgttttcatttaagcttattaggtttctactctgattttaacacgtgctatcactcattctttttattagtatatgttattatttgtatactttagatttctagtttcacaaccctatctcttttgtgttccttataacatttcttcttagttaggctatgcttgttaacaactttttctattttgtaataatgcttttcgagccgatcaatgattctttatgctatactttcatactctgacttttatcaactagttgttgtttcagctgttgatatcaccataagagcctgtattttcattccattctggaagtagagacatgtcttacccaccatctgatgttcgtttttccaatgctactgagggagctgatcactt

SEQ ID NO: 3264 - DNA, 159 bp, Gossypium hirsutum
  Clone ID: LIB3493-014-P1-M1-B12
gttaaactcatgataaatacattttccaattcatagaatggttcacactcacaaacagtctaacccattataaatacattaacatttacaaataccaatccatggaatggttcacactcacaaacattctatggattggtaattgtgaatgttaatgtt

SEQ ID NO: 3265 - DNA, 472 bp, Gossypium hirsutum
  Clone ID: LIB3493-014-P1-M1-B2
ctttaaaaaagaaattctcagcattttcccgaagaattcaaccccccctccatttttttctcaagctttttaagaatcacacaatttcgaaacagattattgtattcatttttgaatcattctctgaaaacccaaaagaaaaaccttggatttttgttcatattttttgtcgccggaaatatgtttggttcaccggagaaaccaatgtttaagcgaacttgtagctgttaagtcagtacttgaaggaaaaaggtagctttggtgatcttactttgggaatcacatgcagtaacaacgttgaaaaagggatgccggagatagtccgtccggcgacggagacgaggacgaccaccatggatttgttccctcaaggagccggtttttctgccgataacggttcgagacgggtcggagtcgatgtggaccctcaaaacgcggcagcgccgatgacgatctttactgcggacaagtg

SEQ ID NO: 3266 - DNA, 418 bp, Gossypium hirsutum
  unsure (1)..(418): unsure at all n locations; Clone ID: LIB3493-014-P1-M1-B3
gctttctactctgggatagtggcatatgcccctgttaaagaacttactgtgattattgtgcttgcatcagcggttctcgccattgctgaggctactgttcccaactccataagttgtcaaccatatatgctcacaatatccggtctcattggctatgcagccgtgactggctatatctctgagccactctactggactctattattggggttatatagtttctcgcggttattaaaaagcgagatgatgttacatcagcactgcctgttgcagctgtaatggctgccatcggngaaccttgggttaggatcttggtgatcacttcttatctagcgttagctatctntaaccattcaaagaagctctcagaagtaacggagcanacagaatgtattgctatggagagaccgcttcaatg

SEQ ID NO: 3267 - DNA, 450 bp, Gossypium hirsutum
  Clone ID: LIB3493-014-P1-M1-B4
aaaaaaagagagatggcgtctgtaataaaatctgcaatcttaattctgtcggtgtttttatctgtacgcttcagttcgggtgttaggttgctccaggaacagcccaatgatgaccccaaaaacatggacgctattcctcccattgatgcactcaaccctaccgagttgaatggacccggtgttggcattcacgaagatcatgttgtcccaaaaggtgctgaaattgtactcttggttttggttttgaaggtggtcctgataaatgttgttcttctggatgttccggtaattgtaatcctggtggtttcgttctaccatttcctcaaattccagaaatcccaagaatttcagaaatcccacaaatcccacagatcccacaaatcccacaaattccactaatcccacagatcccacaagtcccacagatcccacaagtcccaaaaatcccac

SEQ ID NO: 3268 - DNA, 453 bp, Gossypium hirsutum
  Clone ID: LIB3493-014-P1-M1-B5
gtttaaataaacctaaatcactttatagggctccaagaagtcaaagatgtacagctggtgttgttgaaattcctgagactgaatttgctagattttctcatcagatacctgctttccagcacactggagatgatagtcgctggagaggatattgggagctcgatcccttggcctttcctggtatcgtttgtctagactgaatctgctatttcctcgtcgcagtgtggccagagtatgctccgtatgagaaaatggaatgaactgacaggaaactccccctttggaaatgatgcgtggccttaaccgttaatcattttgttctggccaaaaatgatgttcaggtcttttggagagtgaactaattcaagtatttaagttttagttgccaacttgcagtgatgatgaatcgaatttttatatgatctgcatcagggcttatcttgtagctttcta

SEQ ID NO: 3269 - DNA, 413 bp, Gossypium hirsutum
  Clone ID: LIB3493-014-P1-M1-B7
aaatcatatctctacttttcctctcgatttcccgagctaattgggagagtcttgaaggtaaaaaccgaagaaacaaagcgctctctctttgtgaatccaatcaaatcgaagatgttgagagtggcaacgaggcggctcacttcttgttcgtctgcgtggaggtcgcaccaggccacctccgctatcgcctctcgtcctttcatcgacggctccgattttctgattgtctcagatccaatttctcctcctcctcattttccttctctttcgcttctcaattccttcttcccaccagaggttttgcttctgagtcactcaccccaaaaagtgaccacagtgtgattcctgatgttccagcaacagtggctgctattaagaaccccagttctaaaataggttatgatgaatacaac

SEQ ID NO: 3270 - DNA, 438 bp, Gossypium hirsutum
  unsure (1)..(438): unsure at all n locations; Clone ID: LIB3493-014-P1-M1-B8
cggacgcgtgggtttatcttcctgttgcgtgtgcactggttatgtgtggtgaaaatcttgacaaccacatcgatgtaaagaacattcttgttgacatgggaatctactttcaagtacaggatgactatttggattgctttggcaatcctgagaccattggtaagattggaactgatattgaagattttaagtgctcttggttggtggctaaagctntgaaatctgtaatgaggagcagaagaaagtgttatatgagaactatgggaaaccagaccctgccaatgttgctaaagtgaaggctctatacaatgagcttaatctcaagggcgtatttgaggactactaaagcaagagctatgagaggctcgttaccttaattgaagctcatcctaacaaaccagtgcaagcagtgctgaagtcattcttagggaagatcta

SEQ ID NO: 3271 - DNA, 513 bp, Gossypium hirsutum
  unsure (1)..(513): unsure at all n locations; Clone ID: LIB3493-014-P1-M1-B9
gctgtttgcaagatagctgaggaatatcttactaaagatgctctggctacagtaaaggaactgctccctgattccgctggaggtgagcttgcatctgtatgctcctgggctgatgatgtaaggtggcactatcattggtctagtcccttacactatgttgacaccccagatttcaagtgtaattataaatactgccgggactgccatgatgctgctgacataaggatcactgcgtaactggagccattttcaactatacaaagcaacttttttcagcatatcagggatatagtcctcagtgagttacaatttgacagaggcgcttatgttcttagctcattttattngggatgtccatcagccattacatgttggcttcttaggagatttaggtgggaatacaattacagtccgttggtaccgcaggaagacaaatctacaccatgtctgggataccatgattattgattctgctgtgaagacattgtatggctcagatcttgcaacaatgat

SEQ ID NO: 3272 - DNA, 340 bp, Gossypium hirsutum
  Clone ID: LIB3493-014-P1-M1-C1
cggacgcgtgggcggacgcgtggggttctataggcctagcgggcatcttcgggatatatgctgttgtatgtctgatatcgtgggtgtttgtgttcttgaaagtaccagagaccaaaggaatgccacttgaagtcattaccgagttcttttctgttggtgcaagacaagctggtgctacaaagaatgagtgaagtcacactgctttcaatggtgtcaaattctatttcaatttcggccgttaagctttcatcatttttgttccttcttgttgctttgaaaattagggatcctcttattcaaacattaaaattataaaattttcccactagaaattgagttt

SEQ ID NO: 3273 - DNA, 532 bp, Gossypium hirsutum
  Clone ID: LIB3493-014-P1-M1-C10
tcgggctctcacacctcgtatgtgttatatataaaaagttgggtgtttttttgttttaataaaaacaaagaacaagccatccccctccctcttctatcatatattcctctttcttccttttttcttgttctattcatctccttaaatctctcattttcatttcggaatacaataaatcaatacggtctcattgtttgggtccaactccggtgaactgttcgatgaaccaacctggctgttttccagcgggaaaggagcggcgatttgtacgtatgccgggagcggtgaggcccactagagcgccggtggtgggaaagggaggaaagcgatgttggtttgcagggttattgcgggtcgggtctcgaaacgggtagggttcgggtacgagtcattgatggatggtcggatcgggtatgactcagtgagtggagacaacggcgagttgctcgtgtttgatccacgtgcagtattaccatgctttcttatatctacaaattgtaaatttcccttaattgatctctgactatagttt

SEQ ID NO: 3274 - DNA, 338 bp, Gossypium hirsutum
  Clone ID: LIB3493-014-P1-M1-C11
gtctggtaccacgatgatctatttacaatcttacttgggtatataggctttactcctatacttcacttccttctaacacttaatataactttcatctttccccctctactcatttctttcacaccccctccccactgcctatcttcacttcccatctctcaagataatatcacataatctctgaagaaatggatagttgagaggtcaacttgtcatccccaaggagacatgccactttcactaaccctcctttgtaccatccatttattccaatttcaatgtatattgataagcattgagttaataacacatacaataaaataaaatctatcatctat

SEQ ID NO: 3275 - DNA, 532 bp, Gossypium hirsutum
  unsure (1)..(532): unsure at all n locations; Clone ID: LIB3493-014-P1-M1-C12
atccgttcaaatggaccttgttacaaccccaacactgttaaagcacattgcaattatgctgttaacagctatttccaaaaaaaaggccaaggtcaaggctcctgtgaatttgctggcacggcagctatcactacaactgaccctagctctggtggctgttcttacccctccagtgccagtggtggaggcacgaccttaacaccaacaacaccgggcaccgcaacaactccatcatcatcaacaaccaccacgccctccatcatgaccccaggcaccaacaccccaacaagcactaccccctacagttcaacaacacctaccggagtgttaggaggagtcggcaccggcttaggcccatccggaaccacctccaccaacactgattacagccacggaggattccggctccaacccatttctttcttcacaaccctcctgttttcaggcgtcatgctgatntggggttgaatactacaaaccagcaatgagcctatatgtaatattcagatgtttatctaaggacatgtaaagc

SEQ ID NO: 3276 - DNA, 346 bp, Gossypium hirsutum
  Clone ID: LIB3493-014-P1-M1-C2
gtctactggtgttttcactgacaaggacaaagctgctgcccatttgaagggtggtgcaaagaaggtaatcatctctgctcccagtaaggatgctcccatgtttgttgtgggtgtcaatgagaaggaatacaagcctgaccttcacattgtatccaatgctagctgcactaccaactgccttgctccattggctaaggtcatccatgacaaatttggcattgttgaggtcttatgaccactgtccattcgattactgctactcaaaagaccgttgatggtccatcaatgaaggactggagaggtggtagagctgcttcgttcaatatcattcctagcagcactggag

SEQ ID NO: 3277 - DNA, 443 bp, Gossypium hirsutum
  Clone ID: LIB3493-014-P1-M1-C3
cagaattattcggtggtccccggaattacccatcggcaggatcatcggtaatgttagcactcgacggcgattttaaaacagcggtgattgttatctgcggcggagctgaatatggagcttttatagaaaggagtacggacacaccggctcacggtagttgtggtcgtattattgcgacggatccgaacccggtttgggaaatggaagatatgccattcgggcgggtatgggagatatggtaatgcttcctacaggtgatgtattgatcattaatggagctcaatcgggtacccaaggtttcgaaatggcttcaaacccgtgtttgaatccggttctttaccgacccgatcaacctatcggtttacggtttatgactttgaacccgggtacggttcctcgaatgtatcattcaactgctaattgttacccgatggtcggtttta

SEQ ID NO: 3278 - DNA, 486 bp, Gossypium hirsutum
  Clone ID: LIB3493-014-P1-M1-C4
gtcttgcctatctgtctccttttttaatttttttccatttctttattggcttccctgccactcttcttcctccttatattcttcctttccctccctatttccttcttgggttcctctcggctttttcccttttcttctctctatccaaatccaaacacctcttttttcgcaaaattttctaagttttagccatttagaaaaaaactttttgttgttaaaggccccactatgagtaacaatattgggcaatttggtgacacaactttaaccaaagttttcgttggagggttagcttgggaaactcccagagaagccatgagagagcactttgagaagtatggtgagatccttgaagctgtgattatttctgataaagtcactggcagatccaagggttatggattcgttacgtttaaggaagctgaagctgctaagaaagcttgtgaggatgctaaccctatcataaacggccgccgagctaactgc

SEQ ID NO: 3279 - DNA, 540 bp, Gossypium hirsutum
  unsure (1)..(540): unsure at all n locations; Clone ID: LIB3493-014-P1-M1-C5
ctgactggcatccttttaaacgcattaagcttgaatgaggagaagaaggttaggaagtgattgatgatgaagatgaaaagttgagagatttgacggatcatatgggtattgaagcgtataagtcagttacttcagccataaaggaaataaatgaatacaatccaagtggaaggtacataatttctgagttgtggaattacggagaaggaagaaaggcaaccctgaaatagggtgttacattcttactgaagctttgggacaacgctaaacgcaagcgaggaatgacctgaaggtcgctaatttgtttttcaggaaataatttgctgactgcctataaggtgcagtacccatggggggggaaagcaaagaatgcatctccataatatcggattaggtttgccgagtgtagtgtttaatgctgtctntattgttgtctgggttctacataattgaattccatgttaaataatattcagctcccaagccaggaaacaggttccttactgggaagaaactgcattcatgtgacatttagaattc

SEQ ID NO: 3280 - DNA, 481 bp, Gossypium hirsutum
  Clone ID: LIB3493-014-P1-M1-C6
attgctaaatataattgtttgatcgatccgcttgtttacgtttagcttcagcttttccttttccgtcatcgctttgaaaaatcactttcatttcatcgaaacttcctcaacatttcttcttcttttcttttcacttcccatttcccacattagctgtttctgcatcttaaagattcttagtttctgctgtgaaatatcacttcttgagaatggcagcacagcagcttctggccttcaactagcttcagcaagaccctgcattgcatcttctcacagggtatttaaggctggtgctgccagtctagctgtcaattccaaagctgtgtcatggaataagctagctagtgcttgccatttatcacaatctttggagcctttccggcgcagctttgcatcatcttcggtaaattttaacaaagttgtgacaaaggcaatgtctgaatctagtgaaaataagccggtttctgggtgccaattgact

SEQ ID NO: 3281 - DNA, 457 bp, Gossypium hirsutum
  unsure (1)..(457): unsure at all n locations; Clone ID: LIB3493-014-P1-M1-C7
aaaaaaaaaaaagagagagagccctaaaattctctcagagctccggccagtggccgtcctggctcgtctcggagcaccaccgccttcggcaatacgcgcttcacgcgccaccgtatgaaccaccgtgcccggcggttagggctttaaaattttctttttctctcacgaatcaacaggtttatacacgatgattgcgacggaggtgagggcatgctgattaggcctttgattgcggcgcaacatgaggttgatgtcggctggaagcttacggcgcgaaccctagctagggtttctcagaagctgaaactccttaagttagttgggcctgctgggctgtgtttgtttgttggatcaaaagggtattttgggctgattcgggttgtgaatttaagtatgggtgtaatgcgtatttggggagaattnttagggttaaattgtgggttttaatttttgggct

SEQ ID NO: 3282 - DNA, 535 bp, Gossypium hirsutum
  Clone ID: LIB3493-014-P1-M1-C8
ggcaagattgagatcaagaggattgagaactcaagtaacaggcaggtcacttactcaaagagaaggaatggaatcatgaagaaagctaaagagattactgttctttgtgatgctaaagtttctcttatcatctttgctagttctgggaagatgcatgaatattgcagcccttctactaagttgattgatattttggaccaatatcagaaaacttctggaaaaagttatgggatgctaaacatgagaatctcagcaatgaaatagatagaatcaagaaagagaatgatagcatgcagattgagctcaggcatttgaaaggggaggatatcacatctttgccttacaaggagctgatggctttagaggatgccctcgaaaatggccttacctgtgtccgtgccaagcagatggatgttcttgatatggcaaagaaaaatacgaaattcttggaggaggacaataagcaactcaatttcattgtgaatcaacagcaactgacttatgaaaatgtgagagagcatatggatcaccacgg

SEQ ID NO: 3283 - DNA, 355 bp, Gossypium hirsutum
  Clone ID: LIB3493-014-P1-M1-C9
ggcaagattgagatcacgatgctctagaacttattagaaggcaggtcacttactgaaagagaatgtatagaatcatgaaaaatgcttatgaaattactgtcattcgacatgcataaaaactactctaatctgctttgctagatcttaaaagatgctttattgttgcacacctactactaactagattgatatctcggacctatatcagaatacttctttatagagttattggatgcacaacatgagaatcttatcaactaattatatacaatcaagaaacatacttatcgcatgctaattgatctcactcatttaaatagttaggcattctcatctttgcttacaaggatctcat

SEQ ID NO: 3284 - DNA, 140 bp, Gossypium hirsutum
  Clone ID: LIB3493-014-P1-M1-D1
gcttaacagtgggaagggatggaacacgtcctcatgttgattgtatgaaggtggataataatttgtatgtgtatatatatatatctgtgaaatatatctcaatttgcagttgaagatgctcatttctttgtttagactgc

SEQ ID NO: 3285 - DNA, 404 bp, Gossypium hirsutum
  Clone ID: LIB3493-014-P1-M1-D10
cagtgctggagcttcaaaaggcttggcctggttcagaagtgagatgggtcacaggtggccatgtctcgtcgtttcttctacataacaatgagttccgaaaggcaattgttgacgggcttaacagattagagtggaaagaatcctccttatgacagtgcatcagccagtcccggtggttaaatgactgtttttgttgatcacttcagaaaaatgggctatagcaactgaaatttgatggcacccccttaaaattgaaaagagaagggggtagtgctttgtgaatacattatttcttctctaatgtgcttataaatttaacttacacttactttataaagttaactacaccgcaagttactcgatttcttttacacttcattatttagagttttaagttcttcact

SEQ ID NO: 3286 - DNA, 473 bp, Gossypium hirsutum
  Clone ID: LIB3493-014-P1-M1-D11
ctctctcttagaaccatcgttcaatggaacacccaaaggacttatgtccaggaacttctgccatagtttttctccttcttactggccttctctacttatgtgtatggtctccttcaaaccctttacttcccttccatgaacccaatggttcacccaaaaattatactggcgtagagttccttgtgaaagatgagcttgatttggcgttggaggaagcccgatgccgaacaagaccgtcataatcgcggttgtaaatagggcttacgttgagcaaagcgttaatgcggagaccacaatgctggaccttttcttggaaagcttttgggtgggggaagatacgagggcattgctggagcacttgcttctggttacggtggatcagacggcttacgatcggtgcatgttcaagcggttgcactgttacaggttggtgacagagggtgtgatttctgggaggagaagtttacatggtc

SEQ ID NO: 3287 - DNA, 361 bp, Gossypium hirsutum
  Clone ID: LIB3493-014-P1-M1-D12
ggggaattcaggggagggggctctaaagattccttttatttttttaaaagtatgtaaataaagttgtgcattctacatttgtgattctctgatcattcatataattgcaaagacagagtaaacaaatacccttttttcttgctgaagggagaattaaaaaagcaagagaggaacattggttaatccaagatctcaaatttctcaaaagaaactataatgagatgaacatgagcttttcacatgacatgggtgatgaatatgaaaaattcattagaagaatgaatccgcccagggttgtgattgataatgaagcttgcaagaatgcaactgtgataagggttgactgtgcaaacgaacatgg

SEQ ID NO: 3288 - DNA, 451 bp, Gossypium hirsutum
  unsure (1)..(451): unsure at all n locations; Clone ID: LIB3493-014-P1-M1-D2
cgtagaaatacttgaaaatttcagaggcaacgatgatgctctataatcttctcgacggcgtcaaagaaattctgaagattcaaaagttccgaagaattgtttcatacactggattctattgctttgttgctgttttgagctacgcttatacaaacaacacaactagagctgggtattcgagggctgatcaattctatgcttcttatcctgctggaaccgagctttaactgacactgctaagttatataaagcggcattaggcaattgctttgaatcagaggaatggagtccgattgacttctgtatcatggctaaacacttcgatcgtcaagggaaatcaccatatgcctatcattcgcaatacatggcccacctactntctcatggtcaactaagatggagtggctagaaggcttttaagtacgagataggatattcactgctagatgag

SEQ ID NO: 3289 - DNA, 522 bp, Gossypium hirsutum
  Clone ID: LIB3493-014-P1-M1-D3
ccttaatctcaaatctcatctgcaccagccgacgacatggggaggagacctgcaaggtgttatcgccaaatcaagaataagccataccccaaatctcgatactgccgtggtgtcccagatcctaagatcagaatttatgatgttgggatgaagaaaaaaggtgttgatgagtttcctttctgtgtccatcttgtgagttgggagaaggagaacgtctcaagtgagcattggaagctgcccgtattgcctgcaacaagtacatggccaagtttgcagggaaggatgctttccatttgagagtgcgggttcatcccttccatgttctgcgtatcaacaagatgctttcatgtgccggtgctgataggcttcagaccggaatgaggggtgcttttgggaaacctcaaggaacatgtgccagagttgacattggtcaggttctgctctctgttcgttgcaaggacagcaacagccatcatgcacaggaggccctccgtcgtgcaaagttcaagtttccttgtcgtc

SEQ ID NO: 3290 - DNA, 501 bp, Gossypium hirsutum
  unsure (1)..(501): unsure at all n locations; Clone ID: LIB3493-014-P1-M1-D4
gaacattccgtacggaaatgggagcctagcatcgatgggtacttgaaattccttgtggatagtaagctggtttatgatactcttgaatctatcattgacgaggctgcttttcctatctatgctgaattccgaaataccggattggaaaggtctgaaaaactggcaaaagatttacagtggttcgaagagcaaggctatgccattcccaaaccatcttctcccggtatacctatgctgagtatcttaaagaaatatccgacaaggatcctcaagcgttcatatgccatttctacaacacgtattttgcccactcagctggtggtcggatgattggaaagaaggtagctcagcagatacttaacaacagggagttggaattttataaatgggacggtgacctttctcaactgttacagaatgtccgggataagctgaataaagtagccgagagctggactagagacgagaagaaccatngtttggaagaaaccgagaaatctt

SEQ ID NO: 3291 - DNA, 506 bp, Gossypium hirsutum
  Clone ID: LIB3493-014-P1-M1-D5
cccacgcgtccggaagccgacaaaagcgaggatgaagacactgaaaagaaaaagacggtgaaggaaactacttatgaatgggaacgtctgaacgatgttaaggctatatggttgcgtagtccaaaggatgtaacaaatgaagaatacgtaaaattctatcactctctgacgaaggactttagtgatgagaagcccatggcctggagccacttcactgctgaaggtgatttgagttcaaggctgttttgtttgtgcctcctaaggctcctcataatctgtatcagagttactataactccaataaatccaacttgaagttgtacgttagacgagtttttatctctgacgaatttgatgagcttttgccgaagtttcttagttttttgatgggtcttgttgattccgacactctaccactcaatgtgtctcgagagatgctacaagctcatagtagtctgaaaacaatcaagaagaaactcgtgcggaaagcccttgatatgattcgc

SEQ ID NO: 3292 - DNA, 461 bp, Gossypium hirsutum
  Clone ID: LIB3493-014-P1-M1-D6
gaagagggtttcctttgtcatgatcttgtgtgcggtggcggtgttttcaggtgaaacacgcacggtggaagcagtgacatgcagccccatagagctcatcccatgcttgccggcaatcttaacaccgtcaaagccttcatccgtcgcttgttgcaaaaggtgaaggaacagctaccatgcttttgtggctaccttaaggacccaggtgctaagcccttcatcgacactccaatattccaaaggtggctagctcttgtggagttgcgcatgcatttcctcctaagtgttaaaatgttgctttcattagagcattctcgctcaaggactagtatgaataaattaataattaaatggaaatttatctaatattttacccattgttcaaataattataatatactctccaccctttttagtatttacatttgttattttgattggtgtttacatttgtgggaaaa

SEQ ID NO: 3293 - DNA, 354 bp, Gossypium hirsutum
  unsure (1)..(354): unsure at all n locations; Clone ID: LIB3493-014-P1-M1-D7
cttctcntggactcttgagcggccagcnnaaaaatccaatccagatttctacaatnntggaaccggattaagggttaggtaccctgcgatggatnncatcgttcaccggggatgnnctgttgatcgagctaataatctctttttcaaaggaaacagcatatgggaatttatcattgctgatctactagcaaaaggaatgagaaatgctaaaaatgctattctttctggtgttccgctggaggattggcttcgatattgcactgtgacaggtttcgagctctccttcccgcttctactaaagtaaagtgcatttcagatgnctggctttttctccatgcgcaagatgtctcggga

SEQ ID NO: 3294 - DNA, 531 bp, Gossypium hirsutum
  Clone ID: LIB3493-014-P1-M1-D8
cagcaaagtaatttctctcgcaatacatataggttttggggattttgggtctgtctcaaataaataaataaatgaaatctgagattttggttggtgttttctagttgtatgaaatggagttcgataacattgagtgtgtgtcaactacagatggaatgaatgaggatgagatccatcaccataacctgcaacatcctcaccctcatcatattcacctcaattttcatcgtccaagcctcacaatgccaccaacaccaccaacaatgggaataccaccaccaacaacattgtgggtcctacggctatcgctcctgctaccagcgtccatgaattgttagaatgtcctgtttgtaccaattctatgtacccaccaatccatcagtgccacaatggccatacaatttgttctacctgtaaaacaagagtacaacatcggtgccccacttgtagacaggaactcggtgatatcagatgtttagcattggagaaagtggcagaatcccttgagatgccttgcaaatactacaactt

SEQ ID NO: 3295 - DNA, 429 bp, Gossypium hirsutum
  Clone ID: LIB3493-014-P1-M1-D9
gagaatgagaaagctgtgggtccaatagaagatggtgatgctgttgttacttttaacttccgagcagatcgaatggttatgctcgcaaaggcactcgagtatcaagatttcgacaaatttgatcgcgtaaaggttcctaaaattcgttatgctggaatgctccaatatgatggtgagttgaagcttccaggccgctaccttgtttctccccccgagatgacagaacatccggcgaatatttggtgcacaatggtgtacgtacttttgcgtgcagtgagacagttaaatttggccatgtcacattcttctggaatggaaatcgctccggctatttcaaccctgaaatggaagaatatgtggaaatcccaagtgacgttggcattacattcaatgttcaaccgaaaatgaaggcactggagattggtgaaa

SEQ ID NO: 3296 - DNA, 329 bp, Gossypium hirsutum
  Clone ID: LIB3493-014-P1-M1-E10
ccaaactcaagacttcatggctcggaaattcttcgtcggcggcaactggaaatgtaatgggacaactgaggaggttaagaagattgttacaacattgaatgaagctgaagttccttctcatgatgttgtggaggttgttgtgagccctccatttgtgttccttacccttgtcaaaagtctgttgcggtctgattttcacgtcgcctctcagaactgctggttagcaagggtggtgcttttaccggagaagttagtgcagagatgcttgttaatctaggcattccttgggttattattggtcactccgagagaggggctctcttgaatga

SEQ ID NO: 3297 - DNA, 282 bp, Gossypium hirsutum
  Clone ID: LIB3493-014-P1-M1-E11
gcgcctaatctcagtcgctatagatcaaaacttgtttctttgcgcgaaatgataacttgatgtcgaccactctatgtgtcatcgataaagactccagtcagtcattaagactaattgatgttgatacatatcatagtcgagactcatatatctacggtatatcatcaactatgcaggttaaacatggacctctgtgaggcgtttaatcactgtcagcggccaccggagtgatccagatgttgcattgtgctacaaggtcaagggcgttgactgattcatttt

SEQ ID NO: 3298 - DNA, 505 bp, Gossypium hirsutum
  Clone ID: LIB3493-014-P1-M1-E2
cgagctcttctttgaaattgctgagaacaaagaagattacaacaagttctatgaggctttctcgaagaacctcaagcttggtatccatgaggactctcaaaacagaaacaagattgctgaattgctccggtatcactctaccaagagtggtgatgagatgaccagcttgaaggactatgtgaccagaatgaaggagggtcagaatgacatctattacatcactgtgagagcaaaaaggctgttgagaactctcccttccttgagaagttaaagaagaagggttatgaggttctcttcatggttgatgctattgatgagtatgcagttggtcagctcaaggaatttgagggcaaaaagcttgtgtctgcaaccaaagaaggtttgaaacttgacgagagcgaagatgagaagaaaaagaaggaagctttgaaggaaaagtttgagggtctctgcaaggttatcaaggatgtattaggcgacaagggtgaaaaggttatagtatctg

SEQ ID NO: 3299 - DNA, 336 bp, Gossypium hirsutum
  Clone ID: LIB3493-014-P1-M1-E3
gaaagatcttctttcaaccacgcctgataaccgctcggatttttctcagacgtgaaaaaaatggggctgtctttcaccaagctattcagccggctatttgccaaaaaggagatgcgtatactgatggttgggcttgatgctgctggtaaaaccaccattctttacaagctgaagttgtgagagattgtcactaccattcccaccatcggtttcaatgttgagaccgtgaatacaagaacatcagcttcactgtttgggatgttggtggccaggacaagagccgtccattgtggtgacactatttacaaaacatgcaatgacttatttgtgaggttg

SEQ ID NO: 3300 - DNA, 489 bp, Gossypium hirsutum
  Clone ID: LIB3493-014-P1-M1-E4
catcaaccctttgtcgtctccgtacaagaccttgcttagaagaaaaatgtcaaccttccctgactctttcactcaactcgccgacgactccttagactcttttgactctgttccacaccaggaagaagacggtgccggctacgccggatacgacccttctcagcaattcgactctttcgccgaccactcggatcatgccaagggctccagtgatgatgtgtttgcactgattcatacacaaatggggtgggttttggccaagattttggcggatcggacggcccggtgttgcctccgccggcggagatggagcctgaggaaagggttgctctcaaggaatggagaagggagaatgcaattcggttggaggagaaggagaagagggagaaggagttattgagccaaataattgaggaagctgatccatacacagttgaggtttataagaaaagggaggtgacctgtgaaaataacaaggcccattacaga

SEQ ID NO: 3301 - DNA, 413 bp, Gossypium hirsutum
  Clone ID: LIB3493-014-P1-M1-E5
acgcccgcccgctctagtagccgacgctctagctcatggcttctgtctttgcggcgatggctacggtggcgccacacacctcagggggccacatgaacccccaccacaccttgagtgctaacgttggcgggaacatgactctcttgcgcgggattgtctactgtatcgcccaactactaggctcaaccgtctcttgcctgctgcttaagatcgctaccggcgacctggcctgccagctgggtattgtcatcacgtgtgggcgtgtctaacgcattgtttttcgaaatcgcgatgaccttcggattggtgtacacagtgtacgccacagtctgtgatccgaaaaagggaagcttgtgaacaatcgcaccactggcaatcggtctcatcgggggggccaacattttggcaggagg

SEQ ID NO: 3302 - DNA, 479 bp, Gossypium hirsutum
  Clone ID: LIB3493-014-P1-M1-E6
cggacgcgtgggcatgagcattgtcttcttcctatccacatctacattgtcgaagtaagcgccggcttttatatatatcacaaacctagctaattcaacaaaccagttcattagccacttcattaattaattcattttcccaatttcaaaccatatcaaacgctaatataggtgcagtataaaattaaccttgtgtcactgttgtttggagcagcggaaacagcgcggtgatgttggtgaagtttccagtgccgtccttggcaactatcagatcgaacttggtttcatttaatgaagcctgtagaagttttcgatctcttcaagatagccatgttgggaacccatttttcacgcgtccatatccagggaaaacctcgggtttcgatttgttgactccagggactttgttgagcatcacaagggagttgctcacatgatgagagatgttgtgcaggcccttttttataatgctcctaaca

SEQ ID NO: 3303 - DNA, 518 bp, Gossypium hirsutum
  unsure (1)..(518): unsure at all n locations; Clone ID: LIB3493-014-P1-M1-E7
aatctcttcaaagtcgaagtctcatctctgcgattctagtacggattggagcaaagccgattatatttgttttcattttcttatggattctcagcattttctcggattctttcttctaattttccttcagtcttgtttggtttcggctgatattaatggatcggttcttaaaatgaaaacaggaacttcttcggttccgtttgatccgactcatgtactcaactctcatggcaccctagggctttcatttacaaaggatttttatcgagtgatgaatgtgatcaccttattactctggccaaggataagttagagaaatcaatggtggcggataatgaatcaggtaaaagcgtcgaaagtgaagttcgaaccagctctggcatgtttcttcagaaagctcangatgaagtagtcgctgatattgaagctaggattgcagcatggaccttccttccagttgagaatggggagtccattcaaatactacactatgaacatggtcagaagtatgagccaca

SEQ ID NO: 3304 - DNA, 504 bp, Gossypium hirsutum
  Clone ID: LIB3493-014-P1-M1-E8
cccacgcgtccgggaaagggttgtgctgctgccttgaagcaagccggtgctcgtgtcattgttactgagattgatcccatctgtgcccttcaggctctcatggaaggacttcaggttttgaccctagaagatgttgtctccgaggctgatatcttcgtcaccacaaccggtaacaaggacatcatcatggttgatcacatgaggaagatgaagaacatgccattgtttgcaacattggtcactttgacaatgaaatcgatatgctcggtcttgagacctatcctggtgttaaacgcatcaccattaagcctcaaaccgataggtgggtcttccctgaaaccaaaaccggcatcattgtgttggctgaaggacgtctgatgaacttgggatgtgccactggacacccaagttttgtcatgtccttgtcgttcactaaccaggtgattgcccagctcgaactatggaaggagaaggcaactggaaaatatgagaagaagggtacgt

SEQ ID NO: 3305 - DNA, 471 bp, Gossypium hirsutum
  Clone ID: LIB3493-014-P1-M1-E9
tgcccctcaaccattcggtccacgctgagcagttccttatcaccaacctttccctcaatgcggagccgcgtcttaaatacttcgccgtctccgccgctccttgtggtcattgccgccagtttttccaagagctccgcggtgctcccgacgtcaagatgctcataacttcctccgatgatgaaaagaaaacaaaataagcaacacttgtaatgataaagaccaagaatttacccctttgtctcattttttacctcacaggttcggccccgatgatttgctaggaaaagatgctcctctcctcctcgaccctcgccggaacggcttgtcgtttacctccgacggcggcgagtacgacgagttaaaacacgcggctctcgatgcggcgaacatgtcgtacgcaccttatagcgggtgtccatccggagtggcgttgatagacgttgaagggaagatataccaagggtcttacat

SEQ ID NO: 3306 - DNA, 483 bp, Gossypium hirsutum
  Clone ID: LIB3493-014-P1-M1-F1
taatggtactgcattgaggctcttgaatcaggtaagcccgattccaaaattctttcacttcacatcaaacgagatattgttgagagccttcgaagggaaagacagggttcacatcatagatttcgacatcaagcaagggcttcaatggcctagtttgttccagagtttagcttcaagggctaatccaccaagccatgttagagtcaccggaatcggtgagtcgagcaagaactaaatgaaacgggagacaggctctcgggatttgccgaggcattgaatttgcctttcgagttccatccagttgtggacaggttagaagatgtgaggttgtggatgctccatgtaaaggagaaagagacagtagctgtgaatggtgtgtttcaactgcacaagacactttatgatggaaatggaggcgctctcaaggacttgttgggacttattcgtagcacgaaccctgcagtgttgtcatggcagaacaag

SEQ ID NO: 3307 - DNA, 354 bp, Gossypium hirsutum
  Clone ID: LIB3493-014-P1-M1-F10
gccaaagcatggtgcacggtcacaaggcatcaaaatgagaatggtttctgaaaggggtacagacatttccacgataggtattcattcaattgttcacacatttgagtagaatttgattatgatcacttggaaacgaaattggggcttcctaattgtttttggaatggaaggcttctcttataaagaaataataatgttattgaacaagaattgggatttagtgtacttgttgtacttgaaaaatctttttatcttttcccttttaaactgtgttgatactggctgtgcatcttttccaataattactatcatttttttttttaataaaaatatacaaaccatggtcaaaacacc

SEQ ID NO: 3308 - DNA, 427 bp, Gossypium hirsutum
  Clone ID: LIB3493-014-P1-M1-F11
gctggctgggcttctgggatctcagctacggtgatccaaggtttgttggatatgttggtggaggggggtgcagacaatgtcaaccagtgtttccttgaagcctctcgattcggcagtacagaacttgttcgcattttattgcagattgcccaacggaatagcttggatgttgatgttgatcttgccttgggttttgcctcgcattactgcaagattgggcccctgcttgtctagtggaagagggtaatgctatggcgtttttgggccctttaatgagagcagctgaaagaggatgcatgcaggtcgtccagtggtttgttaaaagaggttgtcgagacatggagctctgtctggccctcactgccgctactttcagcagccaagttggtgtggctgcatatctcctcccccatgtttctaagcatgt

SEQ ID NO: 3309 - DNA, 158 bp, Gossypium hirsutum
  Clone ID: LIB3493-014-P1-M1-F12
acgctggcgtgggagtatccccacatattgggtgtggagtatcccgacctctacccatgaaacacgaacgtccagcatgaccgacacttcatgctttaccgctctgactttaccaaacggtgggccatgcgctctatactagtgaaaccataaacaca

SEQ ID NO: 3310 - DNA, 403 bp, Gossypium hirsutum
  Clone ID: LIB3493-014-P1-M1-F2
aaattaactggagatccttatgtacctgcaggccaggtggcgtttcgagccagagttggtaaaagatatcaactcccacataatgggctaattcctgaagaatttggagtggttgctcgatataaaggacaagggaggcttgctgaaccaggctttcgaaatcctcgatgggttgatggcgagcttgttattcttgacgggaagtacatcaaaggagggccggtgttggatttgtatattgggcccctgaatatcacttcttggtgttcttcaatcgactaaggcttcaaccataactctatcgtacatagtatttgagcgtgtttattttccgttcagataacacgttttcaactagattcttgtcactgaatagtagagcaacaaagaagggaagagattc

SEQ ID NO: 3311 - DNA, 403 bp, Gossypium hirsutum
  Clone ID: LIB3493-014-P1-M1-F3
tttcactcttttcagtcctaacaaaaggcggcccctcaactctcttctctctttccccttcactgtttcaactcaaagaaatggcggaggagaagaaggctcaatctgctggggtttggcctacggttaaaccttttgtcaatggtggtgcctctggtatgcttgctacctgtgtcatccaacccatcgatatgatcaaggtaagaatccaactgggtcaaggacggcagcaactgttaccaagaacatgcttagggaggagggtgttggtgccttttacaagggtctatcagcaggactgctcaggcaagctacatacactactgctcgattgggatcattcaaaatgttgacaaacaaagcaattgaagccaatgatgggaagcccttacctctatatcag

SEQ ID NO: 3312 - DNA, 356 bp, Gossypium hirsutum
  Clone ID: LIB3493-014-P1-M1-F4
cggacgcgtggggttttaagcatttttctcatttcaatcctcaatttttttgaacctttctcgtatgattaagacatatatatatttctttttaatcataaaatcatgtatcatccattattagttatcatcatcttatcgataaacaaataatttaacctttctctctcttgtatttgttttcattgagatgaacaaagcttaaggtttttttttaaacaaaagtcaaagaaaacccagaaatatatataatttttttagaaaaagaagcaaaaatttcatatatttctagtctgtgaattgtaatttttttaataaaaatattcaaaaaagttccaaaacaccttttggtcatt

SEQ ID NO: 3313 - DNA, 305 bp, Gossypium hirsutum
  Clone ID: LIB3493-014-P1-M1-F5
cggacgcgtggccaaatcatcaaaatgagaatgtgttagggaaaggtgtacagatctttccacgatagatattcatacacatgtacacacatttgattagaatttgattatgctcacttttaaactaaataggagcttagtaattggtattggaatggatggcttatgttataaagaaataataatgttattgaacaagaactgggaattactgtacctggaaggcttgaaaaaacatttgaacatttagctttggaactgtggtggatctggagggacgtctgatgcaactagtactataattt

SEQ ID NO: 3314 - DNA, 502 bp, Gossypium hirsutum
  Clone ID: LIB3493-014-P1-M1-F6
tttcttccactctcgaggatttcctcaagttcccatctttctttggctttcgcatcagctccatggatcgggcgcagctcctcctcgtaggattacctctcttcctcttcgccactgatctcctcagcctcttcactcctccgcccccaaagccgccgtcccatcaccatcaccatcaccaccatcatccccacctacccaaacctccactcaatcctcgaccctagatatttctttacagaaacccagcgctagtggaggaatcggctatggcagcacggtgaatatcaatttctgcgcttcatgctcttacaggggaactgctgtgacaatgaagaagatgttagaagcccagtttcctggaattgatgtaatccttgataactatccaccatcattgccgaaacgtttgctttcgaaagtggttccagttttccaatttggagttatagggattatgatggcaggtgaacagattttttctatgattgggatcacgaca

SEQ ID NO: 3315 - DNA, 458 bp, Gossypium hirsutum
  Clone ID: LIB3493-014-P1-M1-F7
cgtaattttcttggaaaccgaacacctcgattaatttatctccagtcaatcgccgagaaaaaaaatgcagcaccagaggctgaagcaacagcaacaagccttgatgcaacaagctcttcttcaacagcagtctctctatcatcccggcatcttagctcctcctcagatagagccaattcccagtggaaatctgcctcctggttttgttccaagcactgccgcagtgtgtatgtgggaaatatccatacacaagtgactgaaccactacttcaagaggtttttgcaagtactggccctgttgaaggttgcaagcttgtcagaaaggaaaagtcatcgtatggattcgtccactacttcgatcgcagatcagctgctcttgctatattgtctctaaatggaaggcatttgtttggacagcctatcaaggtcaattgggcatatgctagtggtcagagaga

SEQ ID NO: 3316 - DNA, 497 bp, Gossypium hirsutum
  Clone ID: LIB3493-014-P1-M1-F8
cgtttggctcgaccatctttcacttcaccattgtgtcgatggtcttatcgatgtcattcaaggttccactgccgttaccatttctaactgccacttcactgaccacaacgatgtgatgttgttcggagcaagcgattcctacagtgctgacgagaagatgcaggtcactgttgctttgaaccacttcggtaaaggattggtagagaggatgcctagtgccgatttggttttattcatgtcgtcaacaatgactacaatcactggttcctgtatgccattggcggcaccagccaccctacaattatcagccagggcaacaggtattccgcgccaggtaccttcgcagctaaagaggttacttgtaggggcctcttaaaaccggcacagtggaagaattggaactgggtatcacaaggtgaccacttcgagaatggtgccttttttactccatccggtagtccgagtgctagcaagcaatttggtgctgacaaaatgat

SEQ ID NO: 3317 - DNA, 515 bp, Gossypium hirsutum
  Clone ID: LIB3493-014-P1-M1-F9
ccgggaaaacatacaacagagagagagaaaatgtttgcatacgatcgcgtaagccactcgagtgccaacaaggcggatgagatagatctagaatcaggggagactttgtacccgggactcagctacggcgagaaccaactccggtggggttttatccgcaaggtttacggcatcttggcagcgcagttggttctaaccaccgtggtctccgccttcgggttctttcggctccggtcaacgagctccttcgtggaaattctggcctcttgctcttcctctgtttaatccccttcgtcttgttgtggcccttgcatgtctatcaccaaaagcaccctgtgaacttggttatcctcggcctcttcaccgtgtcattgagtctcacagttggtgtgagctgtgcaaataccgatggaagaatcgtgcttgaagcgctaattttgacagctgctgtggttgcatctcttactggctacactttctgggcatcgaagaagggcaaggacttcagctatctc

SEQ ID NO: 3318 - DNA, 398 bp, Gossypium hirsutum
  unsure (1)..(398): unsure at all n locations; Clone ID: LIB3493-014-P1-M1-G1
aaacttcgcaaggcgaaaagggaggctccaccaggtgagaagccagaaccagtcagaacccacctccgaaatatgatcatagtacccgaaatgattggtagcattatcggtgtgtacaatggcaagacattcaatcaggttgagatcaagcccgaaatgatcagccattaccttgctgagttctctatttcgtacaagccagttaagcacggtagacctggtatggtgctactcattcttcgaggttcatccctctgaagtgaagccctttcatgctgcttggagcctcaatttgnggtttactatttgagagttaattttgtttgttgcactcttagtaatgaaaaattcacatccttttggttgctcctttagataatgagacttgacaatgtttt

SEQ ID NO: 3319 - DNA, 324 bp, Gossypium hirsutum
  Clone ID: LIB3493-014-P1-M1-G10
ccgacgcaatcgcttggtgaggaatataatcacatgcttggtgttgcttgatcgagatctcaaacctgtaaaagaccttgttcgagaagatggacacataatgctatcggactttgatctttccataagttgtgctgataggcctatgctagtcaaatcaccatcacgcgagtcacaacccttgagaaagaatccatgttattgcctacaaccagcttgcattgagccctgccattcagccatcatgtgtagctcctacaacatgtttgtgcacctggtcaattttcatgaaaatccaaaaaggaccgagaacccatgaatgaa

SEQ ID NO: 3320 - DNA, 516 bp, Gossypium hirsutum
  unsure (1)..(516): unsure at all n locations; Clone ID: LIB3493-014-P1-M1-G11
agataaaaccctagaaagccctaaattcttctcttttaaactcgcatctataacgcccctgccattttcgtaactctaccaccgctgctctcaatcccttccacttcgccatggcatcagagaagaagctttcgaacccaatgagggagatcaaagtccagaaacttgtcctcaacatctccgtcggtgagagcggcgatcgtcttacacgtgcggccaaggtcttgcgcagctcagtggtcaaaccccagtcttctccaaggctagatacactgtgagatcttttggaattcggcgtaatgagaagattgcttgttatgtgactgtgaggggggagaaagctatgcagcttcttgagagtggtttgaaggttaaggaatatgagcttttgaggaggaacttcagtgatactggctgctttggattcggtatccaagagcacatntgatctggtatcaagtatgacccttcaactggtatctatggtatggacttctatgtngtcttgaacgagct

SEQ ID NO: 3321 - DNA, 288 bp, Gossypium hirsutum
  Clone ID: LIB3493-014-P1-M1-G12
aagccatatctggagatgaagcactcatatctggtggatataaatacaagagcttgtctgatgcaaaaaaagcacctgatatatcaccagcggacaaacgaaaggtcgagcatgaaaagaacatcaaagcctacactaagatacagactgaagattccatagaagactagtccaacgcttacaactcagaaactgatgtccatgactaccggatgatgactgtgaataaaggaggcaaaatgatgaccataaatactcatcaggttggaagacttgtaaaaagagata

SEQ ID NO: 3322 - DNA, 508 bp, Gossypium hirsutum
  unsure (1)..(508): unsure at all n locations; Clone ID: LIB3493-014-P1-M1-G2
ctaagtctcttttatttgcttctttcaccatgaccaagcagcaggctaactggtctccttacgacaacaatggaggatcttgcgttgcgatcgctggagctgattactgtgttatcgccgccgatactcgaatgtcaaccggttacaatatactgacccgagagtactccaaaatctgtaaacttgcggataaatgtgtcatggcatcctcaggatttcaagtgacgtgagggctttacaaaagcaactggcagctaggcacttgatttatcagcatcagcacaacaagcaaatgagctgccctgcaatggctcaattgctttccaacacactttattacaagcgtttctttccttattattcttttaatgttttgggtggccttgataacgaaggaanagggtgtgtcttcacatatgatgctgttggttcctatgagaaggttggatacagttctcaaggttctggttcaacgctcatcatgcctntcttggataaccaactgaaa

SEQ ID NO: 3323 - DNA, 530 bp, Gossypium hirsutum
  unsure (1)..(530): unsure at all n locations; Clone ID: LIB3493-014-P1-M1-G3
gttcagtttgatcagctattctgtgctgcccttcttcttcttcttcaaacaagcagaaaaacaagaggaaaaaaatgggtggagaaagaaaggtctacactttggctgaggtttctcaacacaaccatgctaaagactgttggcttgtcattgagggcaaggtatttgatgtgactaaattcttggaggaccaccctggtggtgatgatgtcttgctgtcttcccagggaaggatgcaactgatgattttgaagatgttggtcatagtagcagtgctcgagcaatgatggatgagttttatgtgggtgacatcgatacatcgaccattccctctaagaggaagtacactcctccaaagcagcctcactatgaacaagacaagacctcagaatttgtcataaagcttctccaattccttgttcctctgctaatcttgngattggccttcggtatccgctcctataccaaaacaccagcttcatcttaagcattgagactcccaagagataatttgagcaatcttcacaata

SEQ ID NO: 3324 - DNA, 464 bp, Gossypium hirsutum
  Clone ID: LIB3493-014-P1-M1-G4
cttgctttggaatatctccacatgcttggtattgtttatcgcgatctcaagccggaaaatgtccttgttcgagaagatggacacataatgctttcggactttgatctttccctccgttgtgctgtcagcccgatactagtcaaatcatcatcacacgagtcagaacccttgagaaagaatccagtttattgcgtacaaccagcttgcattgagccctcagcattcagccatcatgtgtggctcctacaacatgtttttcacctcgtttcttttcatcaaaatccaaaaaggaccgaaaacccaagaatgaaatggggaaacaagtcagtccattgcctgagcttattgccgagccaaccaatgcgcggtccatgtcgtttgtgggaacccacgagtacttggcacctgaaattatcaaaggtgagggacatggcagtgcagttgattggtggacctttgggatc

SEQ ID NO: 3325 - DNA, 380 bp, Gossypium hirsutum
  Clone ID: LIB3493-014-P1-M1-G5
gccggcagctaacagagctgcgaaccctttcaatcttttttattgttttctgaaaagaagggaaagagacctcttcaagttctttgagatccgggcattgcattctcagatgggaaagaaagggaaatggttgtcctctctaaagaaagccttcttctcagagtccaagggaaagaaaaaccagaaatcaaaagaacaatttttggagaaggtgcatttgatcccactggttctgatgcagccaagttatccccacttcctcagcctgaagaggtgaaattaattgaacctgaagttgagcaaagcaagcagacttaccctgtggcagttgccaattctcctgccgttccagctcacgttgctctacaggccattcgaca

SEQ ID NO: 3326 - DNA, 315 bp, Gossypium hirsutum
  Clone ID: LIB3493-014-P1-M1-G6
gacgtgtgttgctatatattttattttgaagaatgttgtttgcatatgaatatgatggcccgacgcctaggaataaattagtactctcatctcatcacatcacatcacatcacatcacatcacatgcatgtgatatgataggattgatgatgtgcaataatttaaatattgtgtttttctttctcaaaaaaaaaacaaaaaaaaaaaaaaagaaccttctaaccaaatgcatcaaaaacaaataagaaatcttgtctccctcaataggtactatgtatattaaatccaaaaggaagttaatctacatttgggggg

SEQ ID NO: 3327 - DNA, 530 bp, Gossypium hirsutum
  unsure (1)..(530): unsure at all n locations; Clone ID: LIB3493-014-P1-M1-G7
gtttttggtgcgcaatgttgtttttcgtggacagtgcaagaacaatggtattgtttttcgtatcgatggcacgcttgttgctccatcggattataaggttattggaagtaccggaaactggcttctctttgagcatgtaaacggtgtttcgatttacggtgggataattgatggtcagggcactggcttatggacttgcaagaggtcaggcaaacttgtcccagcggggcaacgtccttaggcttcagcaattcgcggaacattgtaataagaggattaacatcgctaaacagccaaatgtatcatattgtcatcaatggttgtaacaacgtaaaagtggaaggtgtaagagtgtcagcctctgggaatagcccaaacaccgatggcattcatgtgcaatcatcgagcggcgtcaccattctgaacaccagaatcggaacaggcgatgattggtgtctcggtgggcccggcaccaaccaattatggatngagaaggtggcatgtggacctggccatgggatcagcattgg

SEQ ID NO: 3328 - DNA, 514 bp, Gossypium hirsutum
  Clone ID: LIB3493-014-P1-M1-G8
gttactacttcactctccctctgtcttcaagaaatggatcgtagaagtgcatttgcagttgctttgatttgctttgtggtaaccgctgtcggtggtcaatctccggcagcctcacctactaaagctccgccggccgcggctactcctgctactgctcccgctactgcccctgttagcaaatctaaatcaccggctccaactgctgcccctaccacttcccaccaacttctttaccaccggctgcggctccggagaagtctgcggcggttccagccccatctaaatctgctccggctttttcttctacggctgctgcttcggtgagttctacacctgctccagtacctgtgagctctactccagacaaatcgcctcccgttgctgtaccgacgacttcaccagagagctcggcctctcctccggctgctgttggtgcaccaactactgctgaagtttcggccccagctccaagcaagagcaagagcaaaagcaagaaatccaagaaacaccatgc

SEQ ID NO: 3329 - DNA, 423 bp, Gossypium hirsutum
  Clone ID: LIB3493-014-P1-M1-G9
aaatttgtagagcagagacaatgagaggaacattgacgttgacttggattctgatggtctgcctctcccaagtagcggtgcagagccaatactactcggagagcttaccatatgatcccaggccggttaaggtcactaatctttacttctttttgcatgaaactctccgcggtaagaacccaacagtagtcatggtagcccaagctaacaacacaagaacgacaactactcatcagtgccatttggcaccctatatgccattgatgatcccctcaagataggtcctggggacaactcagaggtgattgggaatgctctgggacttgggatcttgtccggcaaaaattcaacgaccgtggtgatgtacttagattttggatttactgccggaaagtttaaaggcagctctattagcatattttc

SEQ ID NO: 3330 - DNA, 477 bp, Gossypium hirsutum
  Clone ID: LIB3493-014-P1-M1-H1
ctcttgtgtatgatacaatatatgcacatcaggataaagaggatgatatgaaagttggtgttaaatctacagctttgaggtttggggattcaactaaggagtggactactgggtttgggattgcatgcataagtagtcttgctctcagtggatacaatgctgatataggatggccatattatgtcttccttgcagctgcatctggacaattggcttggcagactggactgttaatctaacatgccgagcagattgcaatagaaagtttttgtccaacaagtggtttggtgcgcttattttcagtgggattttatttggaagagtcttctcataaaggtattcatttataaattcttatggccccctaaaggtgctagtgtcctacctgtaaagggcataatataaacaataatagattattggtgtagaaatgaatttgctgtatttttatgaccagctaaatactagttggtaagg

SEQ ID NO: 3331 - DNA, 373 bp, Gossypium hirsutum
  unsure (1)..(373): unsure at all n locations; Clone ID: LIB3493-014-P1-M1-H10
ccaagatcacccaccttgtcttttgcaccactagtggtgtggacatgcctggggctgactaccagctcaccaagcttttgggcctccgcccgtccgttaagcgcctcatgatgtaccaacaaggttgcttcgcaggggggacggtgctccgagtggctaaggacttagctgagaacaacaaaggtgctcgtgtacttgttgtgtgctcggagattaccgctgttaccccncgggacctagtgacactcacctagacagtcttgtgggccaagcattgtttggtgatggtgccgcagctgttataatcggggcagaccccatgcccgaaatcgagaagcccatgtttgaactagtctcagcagcccaaacgatc

SEQ ID NO: 3332 - DNA, 479 bp, Gossypium hirsutum
  unsure (1)..(479): unsure at all n locations; Clone ID: LIB3493-014-P1-M1-H12
cggacgcgtgggtgaaaatggcatggtcaaatactctgcttcagattcacatcaaatccccttcgatcccttctctccatttcccacattccctcccaaaaagctccccattccttcttaatcctaaccctataaatcccattcccagatccctcagaatgcaattccttcacagacccaacgctgtcccactcgtatcaagagccatggacatcatccagcgtctcctcccacgtggcaatccgcagtcctcagtaacctcttgatcttcgtcgtcggcaccccacttttagtggcggngctttctctctccggaatttgtgctgcgttcttgcttggcactctcacttggcgcgcttttggctcccctgggtttctcctcgttgcttcgtacttcgttattggaaccgcagtaacaaaagtgaaaatggctcataaggaggcccaagggattgctgagaagaggaaaggaagaagag

SEQ ID NO: 3333 - DNA, 461 bp, Gossypium hirsutum
  unsure (1)..(461): unsure at all n locations; Clone ID: LIB3493-014-P1-M1-H2
cagaaaccccgatgtccgtcgcacccttctcaccatctccaataactacacactcaacgccattatcgtcgacttcttctgcaccagcgcagcattcgaagtggcctccgatctcaaccttccagcttactctttcctccctaccgccctcggtgccgctgcttgcttactttatttgcccaccctctgtaacaaattcactcaaagcttccaacatctcaaccgctccttgatatccctggtgctccaccgattccatctgcagatatgccgccgacaacgttcaaaggcaacaagctgtatgacgttttcttagacatcgccaccaacttgccccgttcaactgggattattgtggacacttttgaatatctcgagccaaagagcttcaaagagattaatgatggactctgcttgccggactaccccacgcctnccctntactgcatcggacctctcat

SEQ ID NO: 3334 - DNA, 478 bp, Gossypium hirsutum
  Clone ID: LIB3493-014-P1-M1-H3
cgtttctccgccgtcgacgcaaccgtcttaaatggcctccgtcgcactcacctcctcctgccccctcggttactcacgtatcaaatcacttgctttctcttccagatcatgtccaaacccggtcttttcccctccgtttctcccaaaatccacttcacataattccagcttcattaaacagttaagtctcactccagtcataacgaacaatagaatccagaaaaggacagcaaattaactgtcaaagcggcggcatcaactccagccgccgtaactccgccgtcccagcaaccatggcaaggtgcagcattaaagccattgatagcctcgattgctacaggtgtcattctctggttccttcccgtcccctccggtgtctctcgtaacgcctggcagttactttccattttcctcgccacaatcgtcggcatcatcactcaaccattaccactcggagctgtggctttacttggactag

SEQ ID NO: 3335 - DNA, 396 bp, Gossypium hirsutum
  Clone ID: LIB3493-014-P1-M1-H4
ggaacacccaaaaaacaaatctgtcgctgctgtgggcaaagctggtggagataaatggaagagcttgtctgatgctgaaaaagcaccttatatagcaaaggcagagaagcgaaaggtcgagtatgaaaagaacatgaaagcctacactaagagacagactgaggctcccaaagaagaagagtcggagtctgagaagtcagtgtctgaggtgaatgatgaggggatgaggacgatgaagaaggcagcggagaggaagaagatgatgactaacaaggaaggaagacttgttggaggagatatagcataacgagtataggctggtgcttaataggttatatgttaatgcttgtgatgttcccatgttattctctctagatgggcatatgcatgtcattt

SEQ ID NO: 3336 - DNA, 293 bp, Gossypium hirsutum
  Clone ID: LIB3493-014-P1-M1-H5
gttcagcgtgatggtcgtggagaccttcccataactggacctacgcttcaagcactaaagtaaacgacaactatgatctatgcatcatctgtttttctaaaatgggaaacgaagctgattatataagaatggacaagcctatgcattaccggcatccattgtgtgtcagggcatcaaatgatcatgctgcaagagctggcccatctatgcctcatgtcttcggaatagtgaactaaagtcgcctccgcctaaactataaagtcagtctatctaggatgacaatgtatctgatg

SEQ ID NO: 3337 - DNA, 304 bp, Gossypium hirsutum
  Clone ID: LIB3493-014-P1-M1-H6
tctgtgaatttccaaaaccttctccattcccctcaaaccctctcttatccctctccacctggagacaccgtcttggagctgagctcgacacccttctccacacataccaacccgaatggtctccaaatttgctgaaggctaaccctacaaagccaattcccagaaccgtacgttctttgtcttattatcttagccgaatgctgctgttgcggtggctgccaccttgaaatccccccagttgcgaaaactctagccggcaccgatggttataccgggagcaactccaacaatgaggcccggctta

SEQ ID NO: 3338 - DNA, 527 bp, Gossypium hirsutum
  unsure (1)..(527): unsure at all n locations; Clone ID: LIB3493-014-P1-M1-H7
cggacgcgtgggcggacgcgtggggccaaagactctctctcttccctctgtatcgttcccttttctcttttatttctaaactaaattacgttgaagcaaagaataaaagaagcccacaccttagccttttatccaatggcagttgaagctcctcatatgaatcctttccctcctcagttaatcaccaacagcagtggttttatgaaaacaaaccaacggagtggtaatatatgcagtggccaggtggattattgtattccgttggttgattcaatgaaacaagattcccagttttttccattatatcaatccattgtctgtgatccggtttcggccaaaacttcaatcaacaaagctgacagtggccttacctataatatgaatatcccagtctccgcaacaagaaaaaggcccagagattcaatcatcaatggctttgattcatacactgtctcccaaaagaacaaactttgtgggtttcctctcttcttgatgatgatgtcttctnccagatccaacaacaacaa

SEQ ID NO: 3339 - DNA, 194 bp, Gossypium hirsutum
  Clone ID: LIB3493-014-P1-M1-H8
gttatacaacggaatgagtacgaagcatcaagctccggagaagccgagcatcaattgacgtgtgtcatgaacttcggtggatcctcaatggcttccgctgagcgaacgacagaggctgctgaccttatactcacttcacccaatgaaagaccagtcattgagctttctgacatgtgaaagactaccaataaact

SEQ ID NO: 3340 - DNA, 406 bp, Gossypium hirsutum
  Clone ID: LIB3493-014-P1-M1-H9
atttgcttcttgtaaccaacaaacagagcaatattcttgaagatttggagactctgagactgctttccaagctggtacctgaatattgttactctttagatgaggagggaatttgcaagactgcgtttgaattgatctttgcttttgatgaagtcatttgtcttgggcacaaggaaaacgttacagttgcacaagttaagcaatactgtgagatggtagtcatgaagagaaattgcacaagctggtattgcagagcaagattaatgaaactaaggatgtcatgaagcgtaaagctagtgagattgataagagcaagattgataagaataaaggtgataaaggagggttcatgtcaatgggctctggaagaattgaaagtagctttagtgatatgagcatttctagc

SEQ ID NO: 3341 - DNA, 380 bp, Gossypium hirsutum
  unsure (1)..(380): unsure at all n locations; Clone ID: LIB3493-015-P1-M1-A1
gaaaaagaagccaccttgtggaaacagcagctgtcgattgagggttttctttggtggaaaaagcaaagccatggcgatgaacggtggtcttagatcggcttcgaagtttctgacttcgtcctctcaatcacttctccacaagtctggcaatagagggtttcattcaactggagtgaagagaatggggggagggcatgggcatgatgaaccgtattacctccatgctaaacatatgtacaacttggataggatgaaaaatcagaagctgacaatgtctcttggagttntgacagccttcagcattggtgtgtttgttcctatctatgctgtcattttccagcagaaaaagactgcatctggttgatttttattttttatgc

SEQ ID NO: 3342 - DNA, 377 bp, Gossypium hirsutum
  Clone ID: LIB3493-015-P1-M1-A10
cccacgcgtccgtggaagactattcccatcagattgctgaaatgattggattgagaaatgaatctaacttcatacaagctggggtcagaaccatcttggatataggatgtggttatggaagctttggagcacatcttttttccaaacagctcttaaccatgtgcattgcaaattatgagtcatcaggcagtcaagtccaactcactctagaaaggggccttcctgcaatgatcggttctttcaatgcaaaacaattgccatatccatctctttcatttgatatgctgcattgtgcacgctgcggtattgactgggatgaaaaagatggtattttcttgattgaagttgatagagttctaaagcctggtggatacttt

SEQ ID NO: 3343 - DNA, 73 bp, Gossypium hirsutum
  Clone ID: LIB3493-015-P1-M1-A11
catacgcatgggaagcggaacctgagcaacttagctaaaagagcggcgcgcgaggttaaagaggttactgagt

SEQ ID NO: 3344 - DNA, 426 bp, Gossypium hirsutum
  Clone ID: LIB3493-015-P1-M1-A12
agaaagtataaatcatcttcattggctgttcaatgacataaatccagcaaagtcctcatgtaaggcttggaatgatgcttgtgatgcaaagtttcagcgctattgggcattggtgataggcactccaaaggagaatgaaggcttaattcgttctcctctttcaaagattcttcttcatgatggtaagactgagagggtcatcttggctcaaaatgtgggtttagaaccttctcaagaggctgtgactgaatatcgggtattaggtcctatgataaatggatgctcgtgggttgaactgcgcccacttactagcaggaagcaccagctccgtgtccactgtgcagaagctctaaggactcctatagttggtgactataaatatggctggtttggtcacccgaagtggaagcaaatgcctcgagttga

SEQ ID NO: 3345 - DNA, 289 bp, Gossypium hirsutum
  Clone ID: LIB3493-015-P1-M1-A2
tgtgaaggctgtcaattcagttgtcatgaatcatgttaccatcggcgatggctgtataatacagggctccgtgatttgcagcaacgttcagctacaagagcgcgttgtattgaaagattgccaagtcggagctggttttgttgtcactgccggaagtgagtataaggcagaatctttggctaaaaaggagaaatgagtgaaagctgtatctctgaattacttagaaaaaaagaatgcctgtctcgactcttgactcccggcccgtctcgtttttgctttcgagacagta

SEQ ID NO: 3346 - DNA, 273 bp, Gossypium hirsutum
  Clone ID: LIB3493-015-P1-M1-A3
gttgttcttcatgatttcatcattggcatccattgcttcaagccttcaacttcttgtcattagtaattcccgtttttatataatcaggactaggtaagatggcaactttctcagggattttctttggttattttaggtcaattaataaaaaaaaaacattgttttaagttattacttgggaacaactcttaactatgagatactagagctacattacttgcaactctggtttcctttcgaatatgatataatacataagttcttttttttccc

SEQ ID NO: 3347 - DNA, 369 bp, Gossypium hirsutum
  unsure (1)..(369): unsure at all n locations; Clone ID: LIB3493-015-P1-M1-A4
gttgaatcactttatatgcttacggtttttatatatcgtgatcagggaaagatgcgtggaaccaaggagttgcggggaagagtggagaggttgaagacagagatggagaaaagaagcgaggaacggaaggatatcagggaaagacagagacaagtgaaagacaaagttgcagcaattgaagccgaatgcgaggaattaaagagagaaactagattcattgttcagcaaactgtcagaacccagatcaaactggggcttatgttccgcatattgaaagcaagggaaactggtcacttggatgaangccgccttctcactcagatgctccggcaagagaatgcatactttgtaggctaatcgatttattgt

SEQ ID NO: 3348 - DNA, 320 bp, Gossypium hirsutum
  Clone ID: LIB3493-015-P1-M1-A5
cggacgcgtgggttaaaacagggaaagaaaagcagcgtaatgggtgaagaagtgaaggtttttggatactgggcaagcccttacagctacagggcagagcttgctttgaagttgaaaggtgtttcttatgagtacataaatgaggatatctttggcaataagagcgatttgcttttgaaatacaatccggttcataagaaagtcccggttcttcttcacaacgggaaaccaattgtagagtctcttgttatacttgaatacgttgaggaaacttggaagcataatccctatttgccacaagatccttatgacaaagctac

SEQ ID NO: 3349 - DNA, 396 bp, Gossypium hirsutum
  Clone ID: LIB3493-015-P1-M1-A6
aagtgactctcatgaatggtctcatggctcctttgaacatgcaggttcattacatttcattctcggcccatgcagactatgcacaaacgagtacattcttgaaagagctcatgcctcccaacataattcttgttcacggagaagcaaacgagatgggaaggcttaaacagaagcttatcactgagttcactgatggcaacaccaaaatcattacccctaagaattgtcagtctgttgagatgtattttagctccgagaaaatggctaaaacaatcggaaggttggctgaaaagaccccagacgtaggtgaaacttgtagtggtgttctggtaaagaaggttcacatatcagatatggctccgatgatctcacatttctcacagttcaaccgaacat

SEQ ID NO: 3350 - DNA, 385 bp, Gossypium hirsutum
  Clone ID: LIB3493-015-P1-M1-A7
aaaacctcagatacttggccgaggaagaaggcaaagcacagccaaaatgtcgtcgtttttgcaatcacttttggatccgaagaagagctggttagcttctctgcatatgaaagcccttaccacacgcctccgcaaatacggccttcgttacgacgatctgtacgatccttactatgacttggatatcaaggaggcgttgaatcggctgccccgtgagattgtcgatgctcgtaaccaacgccttaagcgtgcaatggatctctccatgaagcacgagtatctccccgaagatcttcagaaaatgcagacaccatttaagagctatcttcaagatatgcttgctcttgtgaagaaggagagagcagagcgagaagcattgggagct

SEQ ID NO: 3351 - DNA, 343 bp, Gossypium hirsutum
  Clone ID: LIB3493-015-P1-M1-A8
cttgacctaatcttgatgtgcacatatactgcagaagacattcttggtgtctgctccacatatccaaagagagcttggctgcgaaaactctcctttagcttatgatattacagctgcttgtagaggatttgtgctgtgcctgatctcatatgatagtcacatcaagggaggcggtttcttgaatgtgttggtggtcggggctcatgtgctctctcagattgtcgatgctactgatcgacggatcatgcttgctctgtggggatgcctgaagcgctggtctctttccggcctgctttgctgaaggcggtcaccatttaagcgctgtcttgcatatatgcttgct

SEQ ID NO: 3352 - DNA, 413 bp, Gossypium hirsutum
  Clone ID: LIB3493-015-P1-M1-A9
caacaatctctcaagtggattactgatttccttataaatgctcatcctaaagacaacgttctctatattcaggtgggtgatcccgacttagatcataaatgttgggaaaggcctgaaaacatgaaagagaagaggcctctcacacaggtgaacataactgttccagggacagaggttgcagctgagactgctgctgctatggcttcagcatctctggtgtttaagacatctaactcggcatactcaagcacacttcttaagcatgccaagcaactttttaatttcgcggacaaatatccagcttcttatagtgagaacatcccagaagttgctacatattacaattcaacaaggtatggggatgagctcttatgggcagcaagctggctctatcatgcaacaagtgatcgatc

SEQ ID NO: 3353 - DNA, 353 bp, Gossypium hirsutum
  Clone ID: LIB3493-015-P1-M1-B1
ttcatggacttaggggtgttttatgtacgtggttctattgacaatttctttttctattttgcatgaatatttttttatcctcactagtgtttctaacaattcacttcttgtttaggttggaagaattaagcagaagcgtggctataaagatcaatggccatggaatattaaaatatacacagatgataaaggaaaccagaaaggcgatgcagttttgtcttacgaagatcctcaggctgctcactctgctggcagtttctttaacagtaagtactcacaaacttcttagtttagtttgttgccttaaatattttacctcatccttgtggaatcttctctcaaatcatgtcatg

SEQ ID NO: 3354 - DNA, 418 bp, Gossypium hirsutum
  Clone ID: LIB3493-015-P1-M1-B10
cggacgcgtgggcggacgcgtgggcggacgcgtgggctgtcttcaagaaatggatcgtagaagtgcatttgcagttgttttgatttgttttgtggtgaccgctgttggtggtcaatctacggcagtctcacctactaaagctccgacggccgcgactactcctgctactgatcccgctactgcccctgttagcaaacctaaatcaccggctccaactgctgaccctaccacttgcccaccaacttcttcaccaccggttgcggttccggagaagtctgcgggtgtttcagccccatttaaatctgctccgtgttctcctccggctgctgctacggtgagttctccaccggctccagtacctgtgagctttcctccagccagatcgccttccgttgcttgaccgacgacttcaccagag

SEQ ID NO: 3355 - DNA, 426 bp, Gossypium hirsutum
  Clone ID: LIB3493-015-P1-M1-B11
caaattccggggctccgtgcccctaatacgaaaccgagcaaaacccaactctgatttactcctaattggtactggccgggtattttccatcactttcctgggaaaaaaaagcataaaaggaaaaagtttcaggagaaatgtactcagctattcggtcgttaccgttgaatggaagtgtaggagattatcaagggtcgtttgatggaaccaacttgactagcgatgcttgtttggttttaacaacggatcccaagcctcgactccgttggacagctgagctccatgaacgtttcgtcgatgctgttactcaacttggtggccctgacaaagcaaccccaaagactattatgagaacaatgggaggtaaaggccttaccctctatcattaaaatcacaccttcagaaataccggctggggaaacaatc

SEQ ID NO: 3356 - DNA, 432 bp, Gossypium hirsutum
  Clone ID: LIB3493-015-P1-M1-B12
atcgcatccaaacccttaaagaaatccgccgcagctgtttaacaccgtaatcggcaccattcaagcctttctcaagtttaaactaagccattcattctctattttctaaatatacaaagaaaatcaccaaaaacagttctcaccacagacaaagcaaactagaataactctataataccttggctccgtcaccgaacaccgccttcgcctgccgtctaatcagccaccggttttgactcgcggcttgtcctcaactttgatggcttccccactatccggattttgactagtgctttggttttcaaagatcggtgctgttttaattattgactgaggtaaacaaaccctagactggtcgaatcagctaagccaaccgcaagccgagatgtcgtcgactctactcgaggtgactcgggctgctcatgaagatgt

SEQ ID NO: 3357 - DNA, 279 bp, Gossypium hirsutum
  Clone ID: LIB3493-015-P1-M1-B2
gaagaatcagatgaggaagacgaggaagatattgattttgatgatgatgatttcgaagatgatgatgaagatatgcttgagcactatcttgctgagaagtccgatttgtccacgcactcttaagatagatgcctaaaagaacgtcttgtggtctgagaattaaatatctattatcatccatgcactctgaacgtcttgcggtttgagaattaaagatcttttatcaactcccattgataagtgggaactgtagtttcattagaagcttcctgtcatttt

SEQ ID NO: 3358 - DNA, 160 bp, Gossypium hirsutum
  Clone ID: LIB3493-015-P1-M1-B4
cgagtaggcaatcatgtcccattcacagctgcttcttctgttcagcatgatgtacatcatgttcaacggccttatgacatgaaaatgttttcggactcgaaccatcagtgccgttaactaccaccattataatgcatttatgtctgttaaatacatgtga

SEQ ID NO: 3359 - DNA, 342 bp, Gossypium hirsutum
  Clone ID: LIB3493-015-P1-M1-B5
ggataaggaaggaattcctccagaccagcagaggctgatttttgctgggaagcaacttgaagatgggaggacccttgcagattacaacatccagaaggagtccaccctccacttggttctacgtctccgtggcgggatgcaaattttcgtgaagaccctgactggaaagaccatcaccctggaagttgagagctcagacacgattgataatgttaaggccaagatccaggataaggaaggaatcccaccagaccagcagaggctgatttttgctgggaagcaactcgaagatgggaggacccttgcagattacaacattcagaacgaatccactttgcacct

SEQ ID NO: 3360 - DNA, 372 bp, Gossypium hirsutum
  unsure (1)..(372): unsure at all n locations; Clone ID: LIB3493-015-P1-M1-B6
cggacgcgtgggtgaagctctatatcaatatcagggtttttggctcacccccccttttctacaaggagcattatcggctcaacaacaattccaggctcaacccactgatatcatcctttgtagctctccaagaacaggtgcagcctggttaaaatccctcactttcgccactattacaagaacttcatacaatgattccaccacccctttactttccaagatgcctcatgatgttgtgcctttcatggagttcgatcatgcccagttttccactaatcgacatcttgaaattcctcttttagccactcatcttccttattccttcttacccagatctataatngattctggttgtaaacttatttacatttg

SEQ ID NO: 3361 - DNA, 277 bp, Gossypium hirsutum
  Clone ID: LIB3493-015-P1-M1-B7
ggactggagaggtggtagagctgcttacttcaatatcattccgagcagcactggagctgtcaaggctgttggcaaagttttgccagcgttgaatggtaagctgactggaatggctctccgtgttcccaccggtgatgtctccgtcggtgaccttactgtgagactcgagaagaaagcttgttacgaagatatcaaggctgctatcaaggaggcttctcagaccaccatgaatggaattcttggatacgtagatgaagatttggagctaactgtcttt

SEQ ID NO: 3362 - DNA, 301 bp, Gossypium hirsutum
  Clone ID: LIB3493-015-P1-M1-B8
cccttttgggaattaccttatgcagaagttattggaagtgtgtaatgaacaacagagaatgcaaattttgttagtggctaccgaagaaccgggtcaacttgttagaatatttctaaacacgcatgggactcgtgtggggcaaaagttgattgagacactaaaaaccaggcaacaaatcttgcttggtggatcaactcttgggcccggttttttatcactcatcaaggacttggatggccatcatgttgtacaacgttgcttgcaatgtcttagctgtgaaaataacaagattattttcatt

SEQ ID NO: 3363 - DNA, 383 bp, Gossypium hirsutum
  Clone ID: LIB3493-015-P1-M1-B9
ctctttctggtggtttcaatcagcaaggctatcgacctcggggaaacagcggtccacctcagtggggtccccggtggcatcctcctcagacatcatatgattatcagcaacgaggaccatatccatctcacaactctcattatcaaccttcgtatggcgggtacccttctcaccaaatggcttcaaggagcaactttggttctagttgggagcagaggcctcatagcatgcagggacctcctcagagtggcggttatgattactacagcatgcaatggggggtctctaaccaacatttgacttcaattcccggtcatggaccgggttcgtcacctgctccagctatggggccggcttcatctcagtcgagttataattatgga

SEQ ID NO: 3364 - DNA, 332 bp, Gossypium hirsutum
  Clone ID: LIB3493-015-P1-M1-C1
cggacgcgtggggaactatataaatacatcgagaagtcgaggagcatttcaggtgtagctgttgaccctaagtttgtgaaattgtccgataaggacatcgtggagatgatattcttcccagtggtgaatgagacttgccgggttttagccgaaggtattgcagtgaaagcggctgaccttgacattgcttctgttatgggaatgggatttccaccttaccggggaggaatcatgttttgggccgactctctcggatctaaatacatttattgtagactggaggagtggaccaaaatgtatggagaattcttcaagccttgtgccttcttggc

SEQ ID NO: 3365 - DNA, 416 bp, Gossypium hirsutum
  Clone ID: LIB3493-015-P1-M1-C10
gaagaagaagaggagaggaagatgaggatgaaatgaaaatggaaaatggaggcaaccatggaaaggatatgcttttggaccatcttggagatgacattgttgctgcttctgcaactatggagcaacacgaagaagcaccttctgcagaagaaatgcaagaaaggatggatcaattcacctacatcatgcagcagaagtttctctctggtgaagattatgagtatttagattactctaaaatagatgacgatgagaccttggatgatcactggcttagggaagctaaccatgatgcagaggagaagtattttgctgaagattaataacggaaaattacatccattgatctcccaacatttgcagatatctcttcgttatagcagtgggtagtgattacctttttctacttatgtacc

SEQ ID NO: 3366 - DNA, 444 bp, Gossypium hirsutum
  Clone ID: LIB3493-015-P1-M1-C11
cggacgcgtgggcggacgcgtggggaaataacaaatgtttactctgaatctcataccatccactcccatcactttctccaaatccactcatcaatattttcccataaaaaggatccaaagcccaaagaacttggctgagtctcctgtttttttcaccaaatccacccctctcaacttcaacaaaatccatgcctgcccttttggcaagatccaagctttaagcaccaaaactacccatctggggaaaatccttgaaaacccatctaggaaagcaggatcccatgttcccaaagcagctgcatcatctgaatctaatcctgaaagagaagctgaatctgttgaagcagcagcagccgctaaatcgaaggccaaggctttacagcttgcacttgtgttcggtttttggtactttcagaacattgtctttaacatttacaataaaaa

SEQ ID NO: 3367 - DNA, 418 bp, Gossypium hirsutum
  Clone ID: LIB3493-015-P1-M1-C12
cccacgcgtccgcaggtgtccccaaaagcttgtggacatacacaaggccggaaggtggtttccagagaggaagctgtcatgagaattaaagcagcagttgacgctcgcaaagagagtggttccgacattgttattgtggcacgaacagattctcgtcaagcactgtctttagaggagtcactctggagatcaagagcatttgctgatgccggtgcagatgtcctttttattgatgcactatcgtctaaagaagagatgaaagctttctgtgaagtttctccattagttccaaaaatggccaatatgcttgaaggtggggggaaaacaccaatactagctccgcttgaacttgaagaaattggatataaacttgtggcatacccgctttccttgatcggggtatccatccgagcaatgc

SEQ ID NO: 3368 - DNA, 314 bp, Gossypium hirsutum
  Clone ID: LIB3493-015-P1-M1-C2
aaaagagagccgggaaaggaagctagaagagcaaagcgaaaatgaagactatactttcctccgagacaatggacatccccgatggggttagcattaaggtcaaggctaaggtgatcgaggttgaaggtccaaggggtaagcttacccgcaacttcaagcacctcaaccttgatttccatctcatcaaggacgaagagaccggcaagcgtaagctcacgatcgaggcttggtttggctccaggaagaccagcgccgccatccgtacagctcttagccacgttgagaacctcatcaccgggtcactaaaggatacc

SEQ ID NO: 3369 - DNA, 345 bp, Gossypium hirsutum
  Clone ID: LIB3493-015-P1-M1-C3
aaacaaacaaaggaacaataaaaaaaaaaaaaaacattcgcagtttcaacaatggcagagtcgtcaaacaacgttgtcgagacgatcaaccttgattgtcacgattttaagtctcttctctcttcttcagacagggatttcctcgttcgcaacaacggtgatcaggttaaaatcgatagcttgaaggggaagaaggttggattgtatttctcagcatcttggtgcggtccatgccgtagattcaccccaaatttaatcgaggtgtacaccgagctctcaacgaaaggcgaatttcaggtcattcttatctctgccgatgaagatgagagtcattcaatggttact

SEQ ID NO: 3370 - DNA, 283 bp, Gossypium hirsutum
  Clone ID: LIB3493-015-P1-M1-C4
gaaggctacgcgcgtgccaaacaccttcctttttcttttttcaccgaacaacctaaaagaaaaaacgagagaagaagaagaaaactttgaactttcgcttcgacgattacacacttttactctcaacctcaaatgcctcactcaaacataaaagactgaaatcgaatctatttattttaaaagcatactttgatttctttgaattattattattaatttggtttctcagatatttgattgaaatggagttgttagatggaaacttagagctcaaagagattca

SEQ ID NO: 3371 - DNA, 245 bp, Gossypium hirsutum
  Clone ID: LIB3493-015-P1-M1-C5
ggaacttaaagaagcattcagggtgttcgacaaggaccagaatggtttcatatccgctgccgagctccgtcatgtcatgacaaatcttggtgaaaagcttacagatgaggaagttgatgagatgatccgagaagctgatgttgatggtgatgggcagatcaactacgatgagttcgtcaaggccatgatggccaagtaagaacctctctctctaaccataatcgagccaaaactggtgaaaaccc

SEQ ID NO: 3372 - DNA, 421 bp, Gossypium hirsutum
  Clone ID: LIB3493-015-P1-M1-C7
gtcaacatttgggccattggccgagaccctgacgtgtggggcaacccactggatttcacccctgaaaggtttctgagtgggagatttgccaaaatcgacccacgagggaacgactttgagttgattccatttggtgctgggcgaagaatctgtgctggaaccaggatggggatcgtgctggttgagtacatcttaggcactttgttacactctttcgactggatgcttcctcccggtactggggaattaaacatggatgaggcctttgggcttgctttgcaaaaggccgtgcctctttctgccatggttcgcccacgcctcgcaccaactgcttatgtttcctaagcacatcccttgccttatcactactcatttttcctacttctgctgcttttggtatctgatattcaagcctgatgtg

SEQ ID NO: 3373 - DNA, 472 bp, Gossypium hirsutum
  Clone ID: LIB3493-015-P1-M1-C8
gcagccattaacccccaattgatagggtttcacgtggctagcagccgacatgcaaatagctccatcaaaggccgacgacaggcgattaacggccaaatccttcccacgcaagtcgcaaccatggagatccggtaagcccccctttctccttcgtttttttttgttttaaaacaacctcaaatcatattttacttcttcgaaaaccaaaaaaaaaaaatagataaacaaagatcgaagaaaatgttcgaccctccccgagtctcttcattcctgagacgtgtgggttttcataggtatcgacttatttcttaacaaaaaacatgccaactaaagagataaatcgaaaaagaaaagaaagggaaaaaaaaaacacctgagatcacccttgatatctctgatttttctatattctgaggatttgcataaacgtatagtatgcatacagtgtacgtaatctcttcgtaaaaatttg

SEQ ID NO: 3374 - DNA, 384 bp, Gossypium hirsutum
  Clone ID: LIB3493-015-P1-M1-D1
ctctcgtaaaaatccctaaatttttttttcttttagttcaagacctttgcttcaatggctgatgcaggtggttcagccgtctctaagaggatgtggtgctcggttcccgaaagactccagctgcatatggccatgttggccttgcagttcggatatgcagggttccatgttgtttctcgagctgcccttaacatgggcgttagcaaactcgtcttcccagtctacagaaacatcattgctttccttctcctcctcccatttgcatatttcctcgaaaagaaggaccgaccagccattacactaaattttcttttacagttcttcctcttagctcttgtcgggataacagcaaatcaaggtttctatttgcttggtttggataac

SEQ ID NO: 3375 - DNA, 386 bp, Gossypium hirsutum
  Clone ID: LIB3493-015-P1-M1-D10
tcgcggacgcgtgggaaaaatcggaaagaaagaaaaaacatggggatgccgcctgccacgtgcgcctccgcctcttcctcctccatcgtcaactcttctccgatcggtggcgctggcggaggaggtggagagatcatgctttttggagtcagagtggtggttgattccatgaggaaaagtgtgagtatgaacaacctttctcaatacgaacaacctcatgagtcgaacaagcataacaacaagagcaacaaagatcaaggcgatgataacctcaccgctggttacgcctccggcgacgatgccggtcctcactcctctggaaatcgagagcgcaaaaaaagggtgccgtggacggaggaggagcacaagcttgttctggtaggact

SEQ ID NO: 3376 - DNA, 423 bp, Gossypium hirsutum
  Clone ID: LIB3493-015-P1-M1-D11
ggggctgatatcgcggatgagcttaacatcccttgggtggctctttggaccgctagtcccagggcactcttcgttcatgtcgactctgatattattcgccactatgtacgaattaacggtcctaaagacaaaccacttcattttcttccccatttttctagcatacgtgttgctgacttatccaatggattaacctccggagacattgacgcccccatgccggcattgttgaataaaatgggagtgtcactgtcacgcgccgcggcagttgccacaaattcatacgaagacttggataatacagtggtgaacatgctgaaattaagattcagtacgttcctcaacgttggtcccttcaatctggtatcaatttgcaggtccacaagggatgactcgcatgggaccctggattggatgaacaaa

SEQ ID NO: 3377 - DNA, 95 bp, Gossypium hirsutum
  Clone ID: LIB3493-015-P1-M1-D12
gtccatattgcaagtaggtagatggattctaataaacggccaattgggattttagattcatggcatttttttacattccataagtgttgatgggc

SEQ ID NO: 3378 - DNA, 340 bp, Gossypium hirsutum
  Clone ID: LIB3493-015-P1-M1-D2
ctaaaagaacgaaaagagagacaatagagaaaaagtagcgacgaacatggaaagagagcaacaagtttacttggcaaggcttgctgagcaagctgaacgatatgacgaaatggtcgaggccatgaaaaatgttgccaagttggatgttgaactgactgtagaagagaggaatctgttatctgtggggtataagaatgtgattggagcaagaagggcatcatggcggatactgtcttcgatcgaacagaaggaggaagctaagggtaatgaacaaaatgtgaagaggataaaggagtatcggcagaggggtgagatgagcttgcaagatctggtgaatact

SEQ ID NO: 3379 - DNA, 331 bp, Gossypium hirsutum
  Clone ID: LIB3493-015-P1-M1-D3
caacgctccaccttgtccttcgtttgcgtggcgggatgcaaatcttcgttaagacgcttacgggaaagacgatcactctcgaggtcgagagctctgacacgatcgacaacgtgaaagccaaaatccaagacaaggaaggcatcccgccagaccagcaacgtctcatcttcgccggaaagcaactcgaggacgggcggactttagccgattacaatatccagaaggaatcgactcttcatctggtcctgcgtcttcgaggtgggatgcagatcttcgtcaagactttgaccggtaagacgattacttttagaagtggagagctcggatacga

SEQ ID NO: 3380 - DNA, 399 bp, Gossypium hirsutum
  Clone ID: LIB3493-015-P1-M1-D4
cggacgcgtgggttcttgtgcttgttcaggatgatcaattcattgacatgttctaccaggcattgcaaacggtgcatcattcatgagctctaaagctcatcctcaaagcttcacttgaaagttccctgtgcaccatgtacttttattttcttcggtcaggtatcttaacttagacactggattcgatctataccctaattgttaacggatgatagtgtgaaacactaccacgctagcattgtagcttgtattactggagctggcataaattaaaatggactcatggctgctgatgcggcaaaaaggttgaggcctgcatgatgaacataaacctacaagtttcaacatgcaccaaaagaactgatcttttaaggttgtgaagagatgaagaaattaaaa

SEQ ID NO: 3381 - DNA, 354 bp, Gossypium hirsutum
  Clone ID: LIB3493-015-P1-M1-D5
aaaaaaaggaagaaaaaagaggaagcttccttaaggctgaagctctttagggttttttttttttttcctgcaatgggtttgagtagaactcacaagactgccaatggagtttctaccagatgggtttctttcttttgcattgctagcttcttcttgggtgtgcttgttatcaacagattgtggactagttccgatcctgtcaaaatcaatgaggcttcttctgtacagacacatgggagaaaggaagttcatcccttggttaatagtgataaggacacttctgtcgaggcaggtgatattctttctcgagtttcacacactcatgatgtaattatgacattagacaaaacaatc

SEQ ID NO: 3382 - DNA, 321 bp, Gossypium hirsutum
  Clone ID: LIB3493-015-P1-M1-D6
cttttctcttcactccacatctcatattccttcatttctttctaaatacttgcatttttttgattttttttaagtgaaggaacagtgaaaagcaacaggaaatggcaaatatagatatcgatgggatcttgaaggagcttcccaatgatgggcgtatccctaaaaccaagatcgtttgtactttgggtccggcttcacggtccgtacctatgatagagaagctgttgagggctgggatgaacgttgctcgcttcaatttctctcatggcagtcatgagtatcatcaagagaccttggataatcttaggtctgctatgcaca

SEQ ID NO: 3383 - DNA, 290 bp, Gossypium hirsutum
  Clone ID: LIB3493-015-P1-M1-D7
gaaaaaaagagagatggcgtctgtaataaaatctgcaatcttaattctgtcggtgtttttatctgtacgcttcagttcgggtgttaggttgctccaagaacaggccaatgatgaccccaaaaacatggacgctatggctcccattgatgcactcaactctaccaagtcgaatggacccggcgttggcattcacgaagatcatgtatacctaaaaggggctagcattggtgctctcggttgagggtttgaaggttgccctggtaaatggggttccttcagatgtttcggta

SEQ ID NO: 3384 - DNA, 431 bp, Gossypium hirsutum
  Clone ID: LIB3493-015-P1-M1-D9
aagcgatacatgtaccttacagaagagattttgaaagagaatcccaatgtatgtgaatacatggctccttcactggatgctaggcaagatatggtggtagttgaggtgccaaagctaggcaaagaagcagccaccaaggccattaaggagtggggccagcccaagtccaagatcacccaccttgtcttttgcaccactagtggtgtggacatgcctggggctgactaccagctcaccaagcttttgggcctccgcccctccgttaagcgcctcatgatgtaccaacaaggttgcttcgcaggggggacggtgctccgagtggctaaagacttagctgagaacaacaaaagtgctcgtgtacttgttgtgtgctcggagattactgctgttaccttccgtggacctagtgacactcacctagacagtctaat

SEQ ID NO: 3385 - DNA, 433 bp, Gossypium hirsutum
  Clone ID: LIB3493-015-P1-M1-E1
tctaattctcttgtttacaaaagatcaccttcaattcgtagacatcccttttcaccagttttgaatcttcaaaacatcccgaaaagaaccaacgttttggtctcaaagccattgcatatctcatctgttgagtgtattggtaaggagaaaaaaccaataattcaatgcaacgcttatgaagctgacaagtcagagcctattgaggcagcagagcaagtgaaatcagaagctgcaaaaagggtgaaaattgggatttattttgcaacatggtgggggttgaacgtggttttcaatatttataacaagaaagttttgaatgcttacccttacccttggttgacttcaacaattgcccttgcttggggttctttaatgatgtaatttcatgggctacaaagattgcttggaccccaaaaacagattttgaggtttg

SEQ ID NO: 3386 - DNA, 375 bp, Gossypium hirsutum
  Clone ID: LIB3493-015-P1-M1-E10
cggacgcgtgggttggatttgtaaccatgtgcacaatcgaggaagtcgaagctgctactcaacagttcaatggctatgaattggaagggagagcattgagggtaaactcaggacctcctcctcctcgtagggaagaattttctcctaggggagcaagaggtggtccttcaatgggagcaaggggtggtcctcctatgggagcttcaaatcgtgtctatgttggtaacctttcatggggtgttgatgatacagcactcgagaccttgttcagtgagcaaggcagggttgtggaagcgaaagtcgattatgacagggaaagcggtggatcaaggggtttaggctttgcaacttacagttgtgccgatgaggtcaaca

SEQ ID NO: 3387 - DNA, 513 bp, Gossypium hirsutum
  Clone ID: LIB3493-015-P1-M1-E11
gggtgctagagaaacacttaggctgctcatcagtggttcaacacagagtaatcctccattgattgatgtattgccagcagttctaaccaatgctgatgagaaaaaaggtatctttgttgctggaagccggggtctatacagtggaaccagagatgttagcgccattgccaccgttagtctggttacacttacttccagctccgtggtagatagtattataaaacaatgtagtagcagtagcaacagtcatgacgatcctgatacgaagaagctgacgggatctagcagctcggatgaatcatgttctagcagtaatggtgctaaactttcaggctcgagagaagaaaaagttgagtaaataaattaatgtttttctttcttctatttttctttgaaaatgaaaaattgtagataaatgcatctgcagttttgtcataatttaattgtaattagagtcccaatcttttacccattttagggatttgctctattgtagtattttactattgtatt

SEQ ID NO: 3388 - DNA, 429 bp, Gossypium hirsutum
  Clone ID: LIB3493-015-P1-M1-E12
ggcaattgcattaaaaggcggccacttccttgaggcacctgtttctggtagcaaacagcccgcagaaactggtcaacttgtgattcttgcagctggagataaggtcaattggcaatactattttttttatttactctaagctcacacagaccaggtaaaaatggaataagtatcggatatgggtatgtttaatgctttttttaaagttttttttcatgtatttggtaaaccataccgccgtatctttatgtgagtggcagatatggatatgttaagaataagagaaatttgacaagaaagtcaaaatggattgcgtttcctctatcatgattctagggacgatctattttgaatgattgttcaactcgtcgaagggagacgagaactctagggttcatatcatattaaataaggaaaaccaactaaaat

SEQ ID NO: 3389 - DNA, 398 bp, Gossypium hirsutum
  unsure (1)..(398): unsure at all n locations; Clone ID: LIB3493-015-P1-M1-E2
cccacgcgtccgcggacgcgtgggaaatattatagagataatcgaaaattttctagacttatccattaccaaattattatcatttgtctttttcctttcacaaattgtacacctataagctttaattatggcggaggaaacgaagaaggaggtcgcggctgaaacgcccgtggctccgacgccggcagtggaagctccaacgccggtagcggaggatctcaaagctgattccaagaaaacaaccgtagctccaccgccagctgaggaaaaatccgatgaatcgaaggctctagccgtcgttgagaaagcccctgagccagcaccaaaaaaaagttcaactggatcacatgataaagatgtngctctttcggatcttgaaaagaaaaaaagctgcatca

SEQ ID NO: 3390 - DNA, 314 bp, Gossypium hirsutum
  Clone ID: LIB3493-015-P1-M1-E3
gtaaaaaactttttatttatttatagattaagttgctaaaagccatgagttttttcttttcttttttcttccgagtcaataaagaagaaaaaggttacaaaaggaggactaataatgtaaaatcctaaagcatattctgatgcttctaaaaaggcagaggaggtgttattgaggttcaacttgtacttgcagatctgctaaagaaaaacaactctgcgatttgagagtgaccttcagcttgctttgctgctgcaacttgggttttatcgctgctactggtacgttgtcatttgatgatgatgaaaatgacgacg

SEQ ID NO: 3391 - DNA, 365 bp, Gossypium hirsutum
  unsure (1)..(365): unsure at all n locations; Clone ID: LIB3493-015-P1-M1-E4
gcatgctcttaaagtttctctggaagaattgtacaatgggacgacaaaaaagctctctctttccaggaacgcaatatgcagtaaatgtaaagggaaaggttcaaagagtggagcctcctctagatgttatggttgccagggcacaggaatgaaaattacaacacggcagattggactgggcatgatccaacagatgcagcatgtttgtcctgaatgcagaggctcaggtgagatgatcagtgatcgggatagatgcccacagtgcagagggaacaaggttactcangaaaagaaggtgctggaagtacatattgagaaaggaatgagagatggtcagaaaaatacatttgagggacaagctgatg

SEQ ID NO: 3392 - DNA, 346 bp, Gossypium hirsutum
  Clone ID: LIB3493-015-P1-M1-E5
atcggatagtaggaacaacgtgaaggttcgagtccgatggtattatcgtcctgaggaatcgcttggaggaaggaggcagttccatggagcaaaggagctgtttttatctgatcactatgatgtgcagagtgctcaaaccattgaagggaagtgcattgttcattctttcaagaactattctaagcttgagaatgttggggctgaggattacttttgtagattcgagtataaagctgttaccggagcctttacgcctgaccgggtagctgtgtactgcaaatgtgagatgccatacaactcccgatgatctcatggtacaatgtgaggtctgcaaggactggtatca

SEQ ID NO: 3393 - DNA, 381 bp, Gossypium hirsutum
  Clone ID: LIB3493-015-P1-M1-E6
gcgtgggcaatcgaagaagtggcattcaatgttccaggtctgtcagctgagtgcttcatacctcctgatgaaataagattggcttcaatggatgaagcctgtgaattctctcagggtccaaccctaaaaactagtttggctactgctccataccgacccaaagttggtaaactagataaaagttcatgacacaattttatctggggggatgaacttttttaaaagagggcttttttggcaaatttccatacaactttgactacatgtaacacttttacttgactaactaactacaagctaaagtcgaaattgtacttctgtaagaattttttggtattggataatgtcgctttcaatttgtaaatacacattgattttcat

SEQ ID NO: 3394 - DNA, 493 bp, Gossypium hirsutum
  Clone ID: LIB3493-015-P1-M1-E7
ggcaaaggcagtggccattcacatcaccacaccaattgtaattactttaacacctccgttccctccttcctccgttcttcattagaatattttagatttaaacggactcgatccctaagctagttatgtactaatgggaacagttagtgttgcaaacaaggatatcaatgttagcttagctgaaaaaaagcctagagttgcttttgttatgggcggccctggcagtgggaaaggtacccaatgcgcaaatatagtcgaacactttgattacacccatctcagtgctggagatcttctccgagcagaaattaagtctggttcggaaaatggaaccatgattcagaacatgatcaaagaaggaaagattgctccttctcgggtcacaattaagcttctccagaaagccatgctggaaagtgataatgacaagttccttatcgatggtttttctcgtaatgaataaaaccgcgcagcatttgaagctgtacaaaaa

SEQ ID NO: 3395 - DNA, 446 bp, Gossypium hirsutum
  Clone ID: LIB3493-015-P1-M1-E8
agattgtcaaaatgtgtccaaattgcccgtctctatcttgaggatgatgattctgttaatgcagaagcttttattaataaagcttcattcttggttagcaacagtcagcatgaagttttgattttacaatacaaggtatgttatgcaaggattttggatttgaagaggaagttcttggaagcagcattgcgatactatgacatatctcaaattgagaagcgacaaataggagacgaaacaattgacgaggatgctctggagcaagctctatctgctgctgttacatgtacaatattagctggtgcaggtcctcagcgttctcgtgttcttgccacactttacaaagatgaacgttgctccaagctgaagatttatccaatattacaaaaggtttatttggagagaatatttagaaaacctgaaattgatgcatttgctggagaact

SEQ ID NO: 3396 - DNA, 466 bp, Gossypium hirsutum
  Clone ID: LIB3493-015-P1-M1-E9
gtagacctttatgctttcgtcattggaagctatttcatttggacagccatggctggggctagatacaccattgagcacataagaacaaagagggctgcagttctgttgagccaaatctggaagtggagtgccattgtcatcaagagctcagtgctcttatcaatatggattttcgtcatacctgttcttatcggtctgctttttgagcttttggtgattgtgcccatgcgggtgcctgtggatgagagtccagttttccttctttatcaggattgggcattaggtctcatttttctaaagatatggactagactggtaactgttataccaaaatttattatgtacaatagaaaaaggaaattgttccgacatgtcttagattttcgtgatagacattggaggatattattccacgacagtcaaaagttgatatcttatattcacaggttatgctggatcatatgat

SEQ ID NO: 3397 - DNA, 360 bp, Gossypium hirsutum
  Clone ID: LIB3493-015-P1-M1-F1
ggtgcataatggtgtccgtacttttgcctgcagtgagactgtcaaatttggccatgtcactttcttctggaatgggaatcgctccgggtatttcaatcctcaaatggaagaatatgtggaaatcccgagcgatgttggcattacgttcaatgttcaacctaagatgaaggcattggagatcggtgaaaaggctagggatgctattctgagtgggaaatttgaccaggtacgtgtgaacataccaaatggtgacatggtgggtcataccggagatatcgaggctacggttgtggcatgcaaggctgccgatgaagctgtcaagatgatcctcgatgcgatagaacaagttggcggaatata

SEQ ID NO: 3398 - DNA, 404 bp, Gossypium hirsutum
  unsure (1)..(404): unsure at all n locations; Clone ID: LIB3493-015-P1-M1-F10
catccctatgtatcaccattttccattcattcttttctccccctttttgtttctttcttaatttcattcattattgttctttcgttttaataccatttatgcttccccataaggctcttcgagttttttttttttcaaaaaatggttcagggtttaatggaaaagcttgaatgggcgagtagttatggcaagaaacaatgcagaaaccttttttggaaaatgaaagcagctttgaagagaagaagcaaaaggcagttcaagttccattatgatccttcaagttatgctctaaactttgatgatggttattgccattgtggtgttggaacaagtacagtccaacttgctagattgcanggattttcagagtgtgagaatgttatttggggtatgttttttggatc

SEQ ID NO: 3399 - DNA, 490 bp, Gossypium hirsutum
  Clone ID: LIB3493-015-P1-M1-F11
caccgattggcaagacagagcaagagcagaggtgattgaggtctttggtaatcaaaacccaaattttgaagggatggccaaattaaaaacgattgccatgattatcaatgaaactttacggctctatcctcctgtaaatggtgtgataagaaaagtaggaaaagaagtccgattaggaaaacttgtcctgcctactcatttagaggtcgacatgcgaatcatagcacttcaccatgaccctgacttatggggagatgatgttaatcttttcaaaccagagaggtttgctgaagggatagcgaaagctactaagtacaatgcagctgcatttatgccttttggattgggacctcgatcttgcgttggcatgagctttgcaatcactgaagcaaaaattgcactttccatgattctgcaatgctacactgtcatcgtcttccctacctatgttcacgcacctgcacaacgtcttacactcaagccacaacat

SEQ ID NO: 3400 - DNA, 528 bp, Gossypium hirsutum
  Clone ID: LIB3493-015-P1-M1-F12
agagaagtgattttacggaaaaatggcagaagaattgacggtggatttggaagagcttacgcagcttcaaagcatcgcaaagagaccacgcactctatctcttatttcctctgagattcgcaacttggagaagaccttgaaagagaatgaaaatggggcttctgctgttactgctccacaaattccaattcccatttcaacctcagttaagactccagttaaccctgcactgagttatgttacacttgcctgcttcagctgggatcaagataacgataaagtcaagatatatgtctctctggaaggagttgaacaggaaaaaattcagacagagttcaagccaatgtcattcgatgttaaattccatgacgttcaaggcaaaaactacagatgtgcttgtccaaaattgaacaaggaaattgaaccatagaagtgcaaggtgatggttaagccaacaagagtcatcatcacatagttcaaagcttctaaagggaattggactgacctgcactacaaagaggacaagct

SEQ ID NO: 3401 - DNA, 370 bp, Gossypium hirsutum
  Clone ID: LIB3493-015-P1-M1-F2
accgttttgattccaaggaacaccaccattccaaccaaaaaagaacaagtcttctcaacctactccgacaaccaacctggtgtgttgatccaagtttacgaaggtgaaagaacaaggaccagagacaacaacttgctcggtaaatttgagctctctggcatccctcctgctcctagaggtgtcccacagatcactgtctgctttgatatcgatgctaatggtatcttaaacgtatctgccgaagacaaaaccactggacaaaagaacaaaatcaccatcacaaacgacaagggccgactctccaaagaagaaattgaaaagatggttcaagaagcagagaaatacaaatcccgagatgaagaacataaaa

SEQ ID NO: 3402 - DNA, 257 bp, Gossypium hirsutum
  Clone ID: LIB3493-015-P1-M1-F3
ctgacgcgtgggctccacgtgaggaaagaaaaagtgcgagacagaataacagcatttcaccaacttgtttcaccatatgggaagcatctaaaggctgactcaagccacatgtttaagacagtctacgatctcgaagtgccaagagagcattggcctttctataagattcaacctcacaccgaaatatatactgatggtcaacaataaagccgtgcatgtacatttggagcctactatgtctctagaaacataggacg

SEQ ID NO: 3403 - DNA, 386 bp, Gossypium hirsutum
  Clone ID: LIB3493-015-P1-M1-F4
ctcttgccagggatatgtggcatccttgctggttccttatatcgtctaaatgtcttccacatccgaaaggctaagttccctgagtttattacatcattcttttcgcgtgtttcttgaccttctattgggaatccacctacaacaccagctaggaatcttgcaagaaatgtaccttcctacacaacttgccaagtggagagaacctatgcatccgcagtcgcgtcttcagccatagagccatcggaggatgctgctgctacgctggtgtctatgggcttcgatcagaactcagctaggcaggcacttgtgcatgctagaaatgacatcaatgctgccacaaacattcttcttgaagcacagtcccactaattgaaacatagaattgc

SEQ ID NO: 3404 - DNA, 445 bp, Gossypium hirsutum
  Clone ID: LIB3493-015-P1-M1-F6
attcattaccaaggaaaatggcgacgggtggcatggatgaagcaagcaacatgaaggtggtactgaaacactatgtatctggttcaccacaagaaaccgatatgcatttgacagccggaaccatcaaactcaaagtaccaaaggattctaattccatcatcctcaagaatctttatctctcatgcgatccctcaatgatcttcaaaatgatgaagctcgaacgacaattaacagatccttacgtcctcggttcgcctataactggatatggagtggcaaaagttttggattcagcacatcctggctttgcaaaggatgatttggtgtggggaataactggttgggaagagtatagtctaatttcagaccctaaaaatttctttaaaatccaacacaccgatgtacctctttcctactatgctggaattcttggtatgcctgggat

SEQ ID NO: 3405 - DNA, 417 bp, Gossypium hirsutum
  Clone ID: LIB3493-015-P1-M1-F8
tttgtgtctgtattggctgttggagctgctatattgggatgctttgcattttcaaaagaactgatagtgtttcttgaagctcctgttaaagcacagggtgtacgatttctgcaactagctcctggagagtttttcttcacaactttaaaggtgtcgggatattgtggccttcttttaggaagccctgtaattctgtatgagatcatagcctctgttcttccaggcttaaccagagcagagagaaggtttctggggcctattgtgttgggctcctcagttcttttctatgctggtattgctttctcctacttggttctgactccagcagccttaaatttctttgtttcgtacgcggaaagggttgtggaatctttgtggttcattgatcaatactttgagcttgtactaatgctcatg

SEQ ID NO: 3406 - DNA, 470 bp, Gossypium hirsutum
  Clone ID: LIB3493-015-P1-M1-F9
gcggcgccgtcacaaaatgtcgtcaacggagtctctcatcctccaactccatgaaatctctgccgttaaattcggtgacttcaagctgaaatctgggatcttctcccctatctacatagacctccgtctgatagtctcttacccttccctcctgcaccaaatctgccactccctcctctgctgtctccctccccaaacacactttaacctcatatgcggtgtcccttacactgccctccctatagccacctccatctctctcgacacctgcatccccatgctcatgcgccgcaaagaagtgaaagactacggaactgccaagtccatcgaaggtgtttacgaaaagggtcaagcttggttggtggtggaagacctcgtaacgtccggtgcatcggttctcgaaacggcggcaccgcttcggtctttgggtattaacgtaacggatgccgtcgtggttatagatagggagc

SEQ ID NO: 3407 - DNA, 263 bp, Gossypium hirsutum
  unsure (1)..(263): unsure at all n locations; Clone ID: LIB3493-015-P1-M1-G1
cggacgcgtgggcggacgcgtgggcggtcgtgggngacctacgcgtgtgcctgctgtccctttgcggctgtttcgtgcttggcgttntctgggctctgggttttcgctcttgtttggttggtgttttttgttttttcttgttctttttttgtgttttttgttgctgtttcttttttttttttttttttcttgttttttttgttttttttttttttgttttgtttttttggttttttttttttttttttttttttttttttttt

SEQ ID NO: 3408 - DNA, 448 bp, Gossypium hirsutum
  Clone ID: LIB3493-015-P1-M1-G10
cttgtgtcgtgcttgacgggtttcacttgcatagctagcgaagcttaagagtccgcacgatggggagcatggatagcttttggcagctgcgtgattatctgcgaggacaatcaaaagcctcagaggataaccaatggctgctggttgcctctaaatggcctgaccagaccaggacaaaggacgaacgcctgagcaatcttgatctttcgaacggaccagccgaaatatggacaggggataaatctggttctcggaaggacaacaaatgcgtgaacctcaacttcaatgtggtaaactaggactccaagagtgtggataatgtcagcaaaagctcattccgcagcggtgcctacaacataaatgctggttaccagaacaacaatagccatagcctgagaaacctggctggcaacaaatattgcggcgcttatcatagcttcaaatatgt

SEQ ID NO: 3409 - DNA, 440 bp, Gossypium hirsutum
  Clone ID: LIB3493-015-P1-M1-G11
cttaaacattgattatcggaatcctctgatttttatagtagagttaaacgtatttatttattcaggtcatatatagttaaaagtttatgacataaaacttttaatgctgcctaacaaattggcggcaccagcttaaaatatgcatggacataatattttgggcacttttgcccaccagaattaagctaattccatggatctatctttaattagtgcaggactgaccaatgctttcttaacaagacagttcctcgataatccgtcatggatggatgtatgcatcggaatatggaacaaagtcacttaatacaaagaaattcgacatgagatgttatatgccttttacatcacctataatttttagattgatcgcaaaagacttatattgagtcataacacttacatcagaataagtaatcactgtggcttctgattcaaga

SEQ ID NO: 3410 - DNA, 429 bp, Gossypium hirsutum
  Clone ID: LIB3493-015-P1-M1-G12
acgcgttcgcataaacatagattatagtctgattcaaaagggatacaagaagatcactccattttttatcccttactccatcaccaacatgggatcagcattactagctatagacactggcttaatgggacctaactattccatttcaactgcttgcgcaactgcaaattactgtttttatgccgctgccaatcacatcaggaggggtgatctttaaattatgcaagactgagcaacgcgtgcttgacaggatggttcctggattctccgtcattgatggatgcatgcattggattatggaacatgatcactcaatacgaagtaattctacatgagatttgatatgccacttagatcacctacaatatttagatcgatcgcaaataacttataatgagaaacaacacttacataagaataatgaatcac

SEQ ID NO: 3411 - DNA, 358 bp, Gossypium hirsutum
  unsure (1)..(358): unsure at all n locations; Clone ID: LIB3493-015-P1-M1-G3
cggacgcgtggggccattcttcgtcttgacttggctggtcgagacctcactgattacttgatgaaaattctgactgagcgtggatattccttcaccaccaccgccgaacgggaaattgtgagagatgttaaggaaaagctgtcttacattgcccttgactatgaacaggagctagagacctcaaaaacaagttcatcagtagagaagagctatgagttacctgatggtcaagttattaccattggtgctgaacgtttcagatgccccgaagtgcttttccaaccatccttgattggtatggaagctgcaggcatccatgagactacatacnaatcaataatgaagtgtgatgtggata

SEQ ID NO: 3412 - DNA, 469 bp, Gossypium hirsutum
  Clone ID: LIB3493-015-P1-M1-G4
gctttggcgcagccattttcgatctacctttcttctgatcgatcagtcaaaacatactcataaacaccataaagaacctgttcattttcctcttcttccttttatgaaactgtaagttaaataaaatcgaatcctcatggccctttcaatggcggtttcacggcttaggaacccagttctctcaagagccctcccatctctgtttagagctcgttttctatcttccttcgcctcacccacaccactttctcgcagttcaaatgtggaaaggcctttcaaggactgggatggatcttgcttaaggtccaatgctttgtccaccataattggagtatacggtaattcatcaaagctcaagttgcagattggagttcgtcatttctcttcttcagaccttccggagcatacagtgctggggatgcctgctttgtcttcaacaatgagccaagggtacattgcaaaatggaag

SEQ ID NO: 3413 - DNA, 410 bp, Gossypium hirsutum
  Clone ID: LIB3493-015-P1-M1-G5
agacaatgagaggaacattgacgttgacttggattctgatggtctgcctctcccaagtagcggtgcagagccaatactactcggagagcttaccatatgatcccaggccggttaaggtcactaatctttacttctttttgcatgaaactctccgcggtaagaacccaacagtagtcatggtagcccaagctaacaacacaagcaacgacaactactcatcagtgccatttggcaccctatatgccattgatgatcccctcaagataggtcctggggacaactcagaggtgattgggaatgctctgggacttgtgatcttgtccggcaaaaattcaacgaccgtggggatgtacttagattttggatttactgccggaaagtttaagggcagctctattagcatattttca

SEQ ID NO: 3414 - DNA, 385 bp, Gossypium hirsutum
  Clone ID: LIB3493-015-P1-M1-G6
cttaaacattgattatcggaatcctcttatttttatagtagagttacacgtctttatttattcaggtcatatctacttaaaagtttatgacataaaacttttactgccgcctaacaaattggcggcaccagcttaaaatatgcatggccataatattttgggcacttttgcccaccagaattaagctaattccatggctctatctttcattagtgcaggactgaccaatgctttcttaacaagtcagttcctcgatactccgtcattgatggatgtatgcatcggaatatggaacaaggtcactcaatacgaagaaattctacatgtgatcttctatgcctcttacatcacctacaatttttagatcgatcgcaaaagacttata

SEQ ID NO: 3415 - DNA, 363 bp, Gossypium hirsutum
  Clone ID: LIB3493-015-P1-M1-G7
ctacttggaaccaggaaatcaatttgcagcctcaagaccactcctcagacttcgattttagcgaagcaaagaagaatccgtggcgattttgcaaagtatggagaaacgaccgtacggagaaagtcgctcgtgaaagccgtgcgtgagctcgattgcagcactggtgtgttctagaaacccttaggtttctggcatttccaagcagctgggccttttgggccgtttgtgaattgggctgcgggtttgggttattagttattaggttttaggattgggtcaagttttatgtgactggagtaagtttatattaagggactctgggtataagttacttctggcccaaatatttgtaaccggacattg

SEQ ID NO: 3416 - DNA, 309 bp, Gossypium hirsutum
  Clone ID: LIB3493-015-P1-M1-G8
ggataagtgggagctctcgggcgaaattgaaataccactacttttaacgctattttacttattccgcgaatcggaggcggtgcacggcccctctttttggacccaaggccggctctggccggccgatccgggcggaagacattgacaggtggggagtttggctggggcggcacatatgctaaaagataacgcatgtgtcctaagatgagctcaacgagaacagaaatctcgtgtggaacaaaagggtaaaagctcgtttgattctgatttccaggacgaatacgaaccgtgaaagcgtgggctatcgat

SEQ ID NO: 3417 - DNA, 391 bp, Gossypium hirsutum
  Clone ID: LIB3493-015-P1-M1-G9
cggccactggacttgcaccacagcatggaagttcgtctcggcctctccaagggaccagtctgccctagttttatgtgagattttcattgactacttcagtgttgtcccatgaaggaagtcactgctgaacctttttatttgcccttaatgaatttagccgttctggcctttgtataatgcacatcagctttttttttttattgcgttgggttcaacttcttgaaaaccaactgctttgacaactatttaatccaataccaaggccaatactaaagctggagatgtttatgggtggagtcatgtcactgtttgaaaactcacccaaagcctcaaggctctagctcttttatatgccttcttgattgtgttcgcatgggaaacaaacaaacat

SEQ ID NO: 3418 - DNA, 371 bp, Gossypium hirsutum
  Clone ID: LIB3493-015-P1-M1-H1
ggcgatttatacggagatgcaagcaaggctgtctgcagtttgtcatcctgaagcccattttagtcgctgttacactcgtattatacgccaaaggaaaatataaagatgggaattttagtccaagtcaagcatatctatatcttactatcatctatacaatctcttacaccgtagctctgtatgctttggtgttgttttacatggcatgcagagatcttcttcagccattcaatccagttccaaagtttatcatcataaaatctgtggttttcttaacctattggcagggtgttatgttttttcttgctgcaaaatctggatttattaaggatgctgatgcaacaactcaatttcaaaacttcattatatgt

SEQ ID NO: 3419 - DNA, 415 bp, Gossypium hirsutum
  unsure (1)..(415): unsure at all n locations; Clone ID: LIB3493-015-P1-M1-H10
aatcaaacaaattggcacagacagcaatgataaagcaaatcctgaaaagatgttccagcttagggaagaaacaaagctacggtgaagaacaaggactccctttggatgtcccgaaaggtcattntgtggtatatgttggtgaaaacagaagcagatatatagttcccatctcctttctgacccgacccgagtttcaaagctcgcttcatcaggctgaagaagaattcgggtttgatcacgacatgggcctcaccattccttgtgaagaagttcttttccagtctctaacgtccatgctcagataataagactggttttatatggataggcttttaaatggaggatatacatgaaattaaggcgaagctgcttcattgcttctctttttattagattttccctttattattattat

SEQ ID NO: 3420 - DNA, 300 bp, Gossypium hirsutum
  Clone ID: LIB3493-015-P1-M1-H2
aaaaggaaaaataaataaataaataaaagaaaatccagattttaacatcacagatttttgtctcaaaagaaaaatcgacagatggagttgccggtgatagatctagcgccgtatttggcgattgccgatgccggcaatcgtgaaagtgagtctacaaagcgagtgagtggactcaccgagttgtgccatgaggtgagtcgactcctcaaagaaaccggggctttactggttaaggatccacgctgtacggctgaagataacgataggttcattgatatgatggagaagtacttcgagaag

SEQ ID NO: 3421 - DNA, 362 bp, Gossypium hirsutum
  Clone ID: LIB3493-015-P1-M1-H3
gaaagaagctgatttgaaaggaaagaaagtgtttgttagagtcgatctgaacgttccattggatgataacttcaacataactgatgacacaaggatccgtgctgctgttcccaccaccaagtatttgatgggtcatggctctaaagtcatcctctctagtcatttggatttcgcccggcattgaagaattagtcaagaagctgaaggcaaggaatactgatgtttatctaatttccaggggcttctgccaaatgatcaatcctgttgcatcaatccttggaattctgcaagaaaacatttttgccaatcaactgctcttttgaaagtcttggggagtttttggattcgatgcttatgatccc

SEQ ID NO: 3422 - DNA, 409 bp, Gossypium hirsutum
  Clone ID: LIB3493-015-P1-M1-H4
agctttcagcaatggagtggaagctctgattcaaaagggatacaagaagatcactccattttttatcccttactccatcaccaacatgggatcagcattactagctatagacactggcttaatgggacctaactattccatttcaactgcttgtgcaactgcaaattactgcttttatgcagctgccaatcacatcaggagaggtgaagctgacatcatggtagctggtgggaccgaggctgctgtcatgccgactgggatcggcgggtttatagcttgccgggcattgtctcaacgaaatgatgaacccaagagggcttccagaccttgggacaaggaccgtgatggtttcgtcatgggagaaaggctgtggtgtactggttatggagaaccctggatcatgctatgc

SEQ ID NO: 3423 - DNA, 330 bp, Gossypium hirsutum
  Clone ID: LIB3493-015-P1-M1-H6
cagctgcttttggggttggcttgcgtgctgagtttggcggatcggcgttcaaacctcttatccaagaggccctctccaggctgaatgctgttatcagacaccctaatgcatcgcatttggacaatgtgatggcttatgacaatgctgtttccgctcttggaaaaatatgccaatttcaccgggatagtatagatgctgctcagattctcccagcttggttaagttgcttgccgataaaaggtgatctgattgaggccaagattgttcacgaacagctatgttctatggttgaaaggtcagatcaggaacttttagggccaacaatcaata

SEQ ID NO: 3424 - DNA, 421 bp, Gossypium hirsutum
  Clone ID: LIB3493-015-P1-M1-H7
cggacgcgtgggtctagatatcctcaaagaacaatggagccctgcactaaccatttacaaggttctgctctcaatctgctcactgctgaccgagccaaaccctgatgaccctcttggtccggagatggctcacatgtataagaccgatcggtccatgtatgaagccactgcttcgtgctggacccagaagtatgcgatgggatgacagttggtggcgtgtcatacgtatcgtctggctcatgttgtcaacatgatcgaaccattgcatgttatcttttgaggaagggagctttggttcacatggaagcagaaaaaaagagggcaattgttgaagccaaacaaagagaacatgttttcaaggctggggaaatggctgcaaaataccgtgcaacccgacaaacctccaaaaaaggtcttgggt

SEQ ID NO: 3425 - DNA, 450 bp, Gossypium hirsutum
  Clone ID: LIB3493-015-P1-M1-H8
caagagcacgggcaagcccaaagccaggtttaagtccccccggagtatctgctgaaagaacagaaaggccatctgttggccaagagattcgagaaaggttttctggtgcggttgaggcatttgcaagacggaatgtctctggccatggtttgcatggtgatcagtctagacacagatcttcagatgacgtgccatcatccaaggatgcacaacctgattctgaaaggacacgctcctcttcgagaaatgatagtgcttcaaagcggcctgttgttgtatcaagcaacagccaacctggctcctctggtgagccaagtgagaatcgttctagcagattattctcaagcagtggtcgcatgtcaacgactcagagagttcaacccggctttgaatctaaatcatcatctttcactcgtactgcagtcacaagagcctgccgtgatgacaccc

SEQ ID NO: 3426 - DNA, 349 bp, Gossypium hirsutum
  Clone ID: LIB3493-015-P1-M1-H9
cgtgtattcgcgtgcctgcgcaacctttgatgttcctcttcacatcgccacaaacacaaaaggagctctgcctcaccctcaggaattgatgcaccatatagggctttacatggcaaaagaaaggggagccaagattgcaaatgaagtcttatttggtgctttaaaataagttcataagctagtatgaggcctgaaatagcgtatcttgaatttagaagctcgagtttcttttggatagagatcaagtatgtatgaactgttaagttgaacatttactcttacatagcgggccttcaaaattataatgccgggtatgtgttagtaataagcacaattatctctttttctc

SEQ ID NO: 3427 - DNA, 152 bp, Gossypium hirsutum
  Clone ID: LIB3493-016-P1-M1-A1
caaagcttgacccggctgacaagaagaagattgaagatgccattgatggagcaatccaatggttggatggcatccagtttgcctaggccgatgaattcgaggatattttgaaggagcttgagtgcatctttttttctatcatcgcctatatt

SEQ ID NO: 3428 - DNA, 314 bp, Gossypium hirsutum
  Clone ID: LIB3493-016-P1-M1-A10
gctccgtctagcgtggcactcagctggaacttttgatgtcaagaccaagaccggaggtccattcggaaccatgaagcaacctgctgagctcgctcatgctgctaacaacggtctcgatattgcagtcaggcttctcgagccgatcaaggagcagcttcctatcctttcatacgctgacttctatcagcttgctggtgttggtgctgttgagatcaccggtgggccggaaattccattccatcctggaagagaggacaagcctcacccaccacctgagggtcgtcttcccaatgctacttgaggagctgatcact

SEQ ID NO: 3429 - DNA, 372 bp, Gossypium hirsutum
  Clone ID: LIB3493-016-P1-M1-A11
ctttttcagagaacgtttattggcaatggaagaagaaacaaagatgctgaaagaagctttggcaatacgtaacagtgaactactggcttcgaggaacctgtgtgcaaagacatccagcaagctccaaactttagaagcacaacttgccatcagcaaccaacaaagaaacccttcaaaaacaattgttcagattcctacagaagtttactccagccaaattgctagcaatccaccgagtatgacttctgtgtctgaagatggaaatgatgatgatagaagctgtgccgagtcatgggctacagccttgatctctgagctctcacatttcaagaaagaaaatagcacttgaaagtcgagcaaatctgaaaatgt

SEQ ID NO: 3430 - DNA, 298 bp, Gossypium hirsutum
  Clone ID: LIB3493-016-P1-M1-A12
atgattgctagttgcttggtgaaagatccttcaaaaagaccttcagcgaagaaattattaaaacattctttttttaagcaagcgaggtcaagtgattatatatcacgaacacttctagatggattgcctgctcttggtgatcgtatccaagcattgaagagaaaagaagaagatatgcttgctcaaaagaaaatgccagatggtgaaaaagaagaactatcgcagaatgaatataaacgtgggataagtgaatggaatttcaatcttgaagatgtgaaagctcaggcttccctgattc

SEQ ID NO: 3431 - DNA, 272 bp, Gossypium hirsutum
  Clone ID: LIB3493-016-P1-M1-A2
agtggcttcgattgccggaaaactggcagacctgatcagaattacctcaagtatagatggcagcctaatgactgtgcagtccccagcatgctggtgcttgtgatgaaaaaggaaatccaattatcaaggacttctatggcagcccgcttgccgcaagtggtaagccttacgacgatatgttagtggctaaatttgaatgtgtctatactggttctggtgatcaaggttcctccatgtttgcatttaacatggaacaagggattcctgtcatg

SEQ ID NO: 3432 - DNA, 324 bp, Gossypium hirsutum
  unsure (1)..(324): unsure at all n locations; Clone ID: LIB3493-016-P1-M1-A3
ctttggaaatttggtagaagaagtggtagtgggtaagaatctttaaaaaagcttactttttccccccttcacttccattctcatcaatttctcttttgtcttcctctttttccaatatcatcaaaaaccagccctaacagagcagctgaacctaacatcatcatcatccatggcggcaccgatctggctatgggctttctctgtagccctaactctggttccgtctgtttttggaaactctgaaggagatgctctttacacgttgangaaaagtttgaccgatccagataacatactccagaagctggatccgaaccttgttaa

SEQ ID NO: 3433 - DNA, 86 bp, Gossypium hirsutum
  Clone ID: LIB3493-016-P1-M1-A4
tggagaactcggatggaaacgggccgggtttagcactggtcaatttgggttccaatgcttataaacaaactagtatgtgttggccc

SEQ ID NO: 3434 - DNA, 163 bp, Gossypium hirsutum
  Clone ID: LIB3493-016-P1-M1-A5
caaaaggatcgttaaaaactgttatatggatataaaaacgaaaaacttgggcctgttcgttttagctctagcttcctttttttcagatttttctttttctctttttttgagagagagaggttttatttgattataatctctgaattctctgaattcaagatga

SEQ ID NO: 3435 - DNA, 321 bp, Gossypium hirsutum
  unsure (1)..(321): unsure at all n locations; Clone ID: LIB3493-016-P1-M1-A6
gttgaaggtatggatgtggttaaagccattgaaaaagttgggtctagcagtggaaggactgctaagcctgtcgttattgcagattgtggacagctttgttaagaacaagaacaggaacaagaaatggaataatgttgactctggtctatgaatggtgattcatgtctgaaattatcattttatgtgtntcttttgctggtactngatttggctaggttgttctctaagaacatgactgncataaataatgtacgctatntatcatcatatntgaccatataattgagttattacaaacccctttttgttgtttttggcaat

SEQ ID NO: 3436 - DNA, 79 bp, Gossypium hirsutum
  Clone ID: LIB3493-016-P1-M1-A7
cggacgcgtgggcggacgcgtgggcggacgcgtgggcaattttgagctcctaaagaagctggtccttcctgatggatca

SEQ ID NO: 3437 - DNA, 173 bp, Gossypium hirsutum
  Clone ID: LIB3493-016-P1-M1-A8
cttttgttactttgtgacaaatggagggtccttagctttctctctctctccaaaaaaaaaaaaaaagaaaacgaaacaaagtttcgcttctttgctttctttcgagtaaaaatcaaacgaaaaacaacttaaataatattaaaagattttgattttgatcatcaaattctatg

SEQ ID NO: 3438 - DNA, 364 bp, Gossypium hirsutum
  Clone ID: LIB3493-016-P1-M1-A9
ctcaatctctccttttagctcagaacgctcttcacgctgtgtagaaatgccgttcaaaaggtacgttgagatcgggagagtcgctctcgttaactacagcaaagactacggcaagctcgtcgtcatcgtcgatgttgttgaccagaacagagctctagttgatgccccagatatggtgaggggccaaatgaactttaagaggcttcaattgactgatttcaaaattgacattcctcgtgttccaaagaagaagacactgattgaagcaatggaaaaagctgtgttaaaaacaagtgggagaataagctcatgggtaaaaagctgattgtcaaaagaagagagcatctctcaatgacttcgacag

SEQ ID NO: 3439 - DNA, 310 bp, Gossypium hirsutum
  unsure (1)..(310): unsure at all n locations; Clone ID: LIB3493-016-P1-M1-B1
gcaccagatgctttgagattgttagggaatcaagcgacatatgatgaatcaacagtgcttggtgctttccaatatgtctatagtgatatttatcttcatcgtgacaaaaatttaatgcccaaaaacccagcagcatggagtgcttggaattttcttggaagtacagacaagaatgtatctttgacatactggcttaatgtgcttcagaatctaggagaaacaagcctaccctttttggtcactctcaatccagattatacaccacaacacancctgcttaagtggagaacaggccatccagtaccatctg

SEQ ID NO: 3440 - DNA, 356 bp, Gossypium hirsutum
  Clone ID: LIB3493-016-P1-M1-B10
gtggtgtcctccctggcatcaaggtcgacaagggtaccgttgagcttaacggaaccaaccgtgagactttcacccagggtctggatggccttgcacagcgatgccagaagtactatgaagctggtgctcgctttgctaaatggcgtgctgtccttaagatcagtgctaatgagccaaccgagcttgcaatccaagaaaatgccaacgggctagctatgtatgctgccatctgccagcaatgtggccttgttccaatcgtcgaacctgaaattcttgttgacggatcacatgacattcaaaagtgtgctgcaatgacagaacgtgttcttgctacctgctacaaggctctaaatgac

SEQ ID NO: 3441 - DNA, 405 bp, Gossypium hirsutum
  unsure (1)..(405): unsure at all n locations; Clone ID: LIB3493-016-P1-M1-B11
ccaaaatccaaaaaggaaaaaaaaagaaaaaaaatcctccaaaaatggcgacttcagctactacactcagttcactttccttcttctcttcttcccttttcctctcctctccgtcctctaaactctcaacttccctttccttctctttcaaaccttcttcaaatccgtctctttccatttcttcccaactttccactctccccattttgtccttcaccggccaaaaaatcggcgaaacttatctcgacctcaaatcagcccctcccgaaaccgctagagccgtcgttcaccgagcaatcatcactgacttacaaaacangcgtcgtggcacagcttctacactcacttcgggtgaagtcccgggtggaggaaaaaagccttaccctcaaaaagaaaacccgcgtg

SEQ ID NO: 3442 - DNA, 372 bp, Gossypium hirsutum
  Clone ID: LIB3493-016-P1-M1-B12
ctccagcggccgtttgcatatcgtagctaacctgcaaagtttcgacaatggctgtcgggaagaacaagaggatttccaagggaaagaagggaggaaagaagaaggcggctgatccatttgctaagaaggattggtatgatatcaaggctccatcagtttttactaccagaaatgttgggaagactcttgttacccgtactcagggtaccaagattgcttcagaaggactcaagcaccgtgtgtttgaggtctcactggctgatcttcaaggaggtgatgaggatcatgcttacagaaaagatcgtttgagagctgaagatgttcaaaggaaaaaatgttttgaccaacttttggggaatgaattttacaact

SEQ ID NO: 3443 - DNA, 303 bp, Gossypium hirsutum
  unsure (1)..(303): unsure at all n locations; Clone ID: LIB3493-016-P1-M1-B2
gctcgttccggctgccgggaacggngattccaaggtcttttatctgaagatgaagggggattaccataggtacttggctgagttcaagactggagatgaccggaaagccgctgctgagaatacgctctctgcgtataaatctgctcaggacattgcagtttccgagctcgctccaactcatcctattcgtttgggattggctctgaanctttctgtcttctactatgagatnctgaattctccggaccgcgcttgcagtcttgccaaacaagcttttgacgaagccatctcggagcttgatac

SEQ ID NO: 3444 - DNA, 422 bp, Gossypium hirsutum
  unsure (1)..(422): unsure at all n locations; Clone ID: LIB3493-016-P1-M1-B3
ctggcttgttaggccttggtcggggaagactatcattccccacccaagcaggacgccgcttcaaccggaagttctcttactgtttggtcgacaggtccgcttcttcaaatccgtcctccatgattttcggtgatgcggccattccccgaaccgccgtctntactcctcttcttacaaaccctaagctcgacactttctactacgttgagctgcttgggattagcgtcggtgggacacgtgtccgagggatcacgccttctttattcaaaatggatccagctggntaacggaggggtcattattgactcanngcacgtctgtcacccgcttgacccgacccgcttacatcgcaatgaggggtgcgttccgtatcagggcctcgaatctgaagcgggcgcctgacttcttatggtcgatacatg

SEQ ID NO: 3445 - DNA, 380 bp, Gossypium hirsutum
  unsure (1)..(380): unsure at all n locations; Clone ID: LIB3493-016-P1-M1-B4
cagaaaccagcttcaaacaagagccccaacgtaacaccagcaaaaaggataatgctttcagggttaactgcaggaagtcaactccagcctaaagttttaagctttcattcgaggcanatcactgttcaaaatggaggaaaattgttggccttaagaatcaaggcgtatccaaagaataaagtcagatgcanaattgcagaatcggaccaagacttctcttcaatcaaggggtatgaaaagaatcatcctttagtcaaaatgtgtggtattacatccgctagagatgctgctatggcagcagaagccggcgccaatttcattgggatgatcctttggcctaagtccaaacgctccatttcgctttcagttgcaaaggaaat

SEQ ID NO: 3446 - DNA, 409 bp, Gossypium hirsutum
  unsure (1)..(409): unsure at all n locations; Clone ID: LIB3493-016-P1-M1-B5
gcatcctccgtaacgttcccgtcggcggtggctgccgcaaagccaagcgcaccaaaaccaaagcttcgtcccaaaccaccgcagtcgccgcctccgcactgccgcctccggagcaacaacacggtgatcaacgtaaagcgaattctcattctagtagcgagagttcgagtcttactgccactaactctaacgttgcagtgccaaatcaaaacaactacagttctgccgctggcacggcggaggcggtaacctctcattctaacttgantaaattgagtgaaccgaagttttacggaaaccctaataatttagggttagagccaggattgctagaaacaggatcagactgcgggatatttncggagattgggagtttacgagctngattacatcatcaaacaacgaaaac

SEQ ID NO: 3447 - DNA, 389 bp, Gossypium hirsutum
  unsure (1)..(389): unsure at all n locations; Clone ID: LIB3493-016-P1-M1-B6
cggacgcgtgggtttgcgccgttctgggagcagtcgttcgaaaaggaaatctaaatccttgctcaaaatccgattacgacggagagaagcaaggtccggctaacaggttcgtttctcttcctcccttcctttagtttatatatgtattctatgcgattaagagcaaaacagagaagaaaaaaaaaccactggaaaagaaaagccaagagaaagaagaaaaccttcttttcgaaattttntactgatcccttatttggtgtttcatacaaaaaattctcccctttacagatttttgacatggctttatattgcaaaaaaaaaaaagaaaagaaatgccccccgaatccctttttacatatntcttaattactcctattttctctgatttt

SEQ ID NO: 3448 - DNA, 334 bp, Gossypium hirsutum
  Clone ID: LIB3493-016-P1-M1-B8
gtggttttcgattttagtgatccctctaagaaccttagggaaaaggagataaaaaggcagacgttgttggagcttgttgattatatatcgtctgtttcatccaagttcaatgaggttgcaatgcaagaggttacgagaatggtggctgctaatctatttcgaacattcccatctccgaatcatgatagcaagattttagaaatgtatgatatggaagatgaagaaccggccatggatcctgcttggccgcatcttcagattgtctatgaacttctacttagatttgggtctcaccagagactgatgctaagcttgctaagaagatcgtcgacca

SEQ ID NO: 3449 - DNA, 402 bp, Gossypium hirsutum
  Clone ID: LIB3493-016-P1-M1-B9
ggaagatattcgaatgccaacaaatgctaggctcaaggcaacaagcatgttgatgcagttaatctcatgtggttcgatatctgtgaaagaccatagttttggccttgttccaacctacaggcctaggttttcccattcaaaattttcttcaccattgttctctacttcaatcatgttgggtgagcttgattgcttatccgagaatccgaggttgatgggcctgagattggaagacaaagaatatttcagtggtagcttgattgagacgaagatgctcaaagaaggagaagggcataccactcttgaacgttcttcttcatataatgatgatagggctcgtaaagagttggaatcagcttgagacaaagaagagatgaattcaagtattcaaaatgcatcccc

SEQ ID NO: 3450 - DNA, 301 bp, Gossypium hirsutum
  Clone ID: LIB3493-016-P1-M1-C1
gttttctttctctttagtttacgtttattgtccttttggaatttttgatactagaaaaaggaagcaacgaagaagggaaatggagggcaaagaagaggatgttagattgggagccaacaagttcacagagaggcaaccaattgggaccgcggctcagagtcaagatgacgggaaagactacactgaaccaccaccggctccatttttcgagcctggcgagttaacctcatggtccttttatagggctgggattgccgagtttgtggcgactttccttttcttgtatatcactattttgact

SEQ ID NO: 3451 - DNA, 334 bp, Gossypium hirsutum
  Clone ID: LIB3493-016-P1-M1-C10
ggatgttgacattgattctgaatataagaattacagtgcatctacaagacattcacttgaagcatggtcaggttcacagattgatttgggtctggtggaggccacacttgagcatatttgccgccatgaagctgatggagctattcttgtattcctcacaggctgggatgacatttctaaggtccttgacaagattaaagtgaacagctttcttggggatcttagcaagtttctggttcttcccttacatggttctatgcctaccattaatcaacgagaaatatttgaccgtcctccacctaacaagcgaaaaattgttttggcgacaaatatt

SEQ ID NO: 3452 - DNA, 331 bp, Gossypium hirsutum
  Clone ID: LIB3493-016-P1-M1-C11
gtttgtttttcttttttctctcaagagtgctgtgaaccatgatgccatagtgaatgccaatgatgaagagaaggtgaggcttgaggaacaggcttcacaagtggcacaaagagcagcggaagcattacgacaatcacgaatgcttcgaagccatgatagtatttccgttcctacttggaccgggaaatctggagctgctggtgcaccgtcagcagttcgaaagaaattcggctcagctttgaacactcagttagtaaaaccctcaggtgagtcatctagtaccggcatagcagctggggccgctgccagcaaggcattatcttcagcagaa

SEQ ID NO: 3453 - DNA, 325 bp, Gossypium hirsutum
  Clone ID: LIB3493-016-P1-M1-C12
cccacgcgtccgtggcattctcttttctgggatatttggaactgggaatgggtcatccgtttcagtcgagaatggcggtttgttggcaatgacacgtgtcggaagtagaagagttgtccaaatatctgcagggttcatgatcttcttctccatccttggaaaattcggagctgttttcgcttcaattccagctccaatcattgcagctttatattgtcttttctttggatacgttggttcagggggtctcagcttgcttcaattctgtaacttaaacaacttcaaaataaagttcaatataggtttctctgttttcatgggacta

SEQ ID NO: 3454 - DNA, 316 bp, Gossypium hirsutum
  unsure (1)..(316): unsure at all n locations; Clone ID: LIB3493-016-P1-M1-C2
gcgagagagaaagcaaaaatggagatcaatgaagaaagtttcttagaggaattattagctctaagagagaaaattgnacacagttccaacacanatgaatgaagttntctctaatggatggaactntgattgctntgatgatatgaacctttcaactagtttgtttccaacgactntctgccatgaattctcaacagctntgcctttggaacaagactngngttacttcaatggagtntactggccgtttggtgatgaattctcagcaccacaactcacagattcatcaaacaacacctttgatacaccaccacca

SEQ ID NO: 3455 - DNA, 406 bp, Gossypium hirsutum
  Clone ID: LIB3493-016-P1-M1-C3
tagtggttccggccataaccgacgtcaccatgttcgcactttgccccggcaccgatgaatgctccctcgccatttacctctctggtttccagcaagctgtgataggagttgggaccgctctaatgatgccacttattggaaatttgtcggatcaatacggaagaaaatcacttcttacattacctatgactttgtcaattatcccttatgctgtattggcatgcagtacaacaaccaattatttttatgcctattacaccctcaggacactcactgccatgatctccgaaggcagcattaactgccttgctcttgcttatctggcagataacatatccgatacccaaagagcatctgcattcggtattctttgaggtataagcctaggtgcatttgatttgaacac

SEQ ID NO: 3456 - DNA, 396 bp, Gossypium hirsutum
  unsure (1)..(396): unsure at all n locations; Clone ID: LIB3493-016-P1-M1-C4
catttcttggatgctgcccgtgaaaatttgtctcaggaacattttgttgcctctgacgtgcacaaggcgactaatttctactgtgtcccgcttcaagagttcactcctgaagctggaagttacaatgttatttggattcagtggtgcattggtcatctcacagatgatgactntatctcattntttaagagagcaaaggtaggccttaaacctggtggattctttatcttgaaagagaacattgcaagaaacggatttgttttggataacgaagaccgaagcatcacaagatccgatttatacttcaagggacctattcgtcaatgtggattgcacctgtataaaatgaaggaccagaagggacttcctgaggaatgtttgctgtaagatgtatgc

SEQ ID NO: 3457 - DNA, 434 bp, Gossypium hirsutum
  unsure (1)..(434): unsure at all n locations; Clone ID: LIB3493-016-P1-M1-C5
cggacgcgtgggcggacgcgtgggtggctaagcttcaggagacagaggattggttatacgaagatggggaggatgaaactaaaggtgtttatattgccaagcttgaagagcttaagaagcaaggtgatcctattgaagaacgttacaaagagtattccgagaggggaactatcattgatcagcttgcttactgcattaacagttacagagaggccgccatgtcaaatgataccaaatttgatcacattgaacttgccgaaaagcagaaggtttttgaatgagtgtgttgaagctgaggcctggctcagagagaaaaaacagcagcaggatcaacttnccaagtatgccacacctgttctcttgtcagctgatgttgagaagaaggcttgaacacttggacaggttttgcaagccaataatgatgaaaccctaac

SEQ ID NO: 3458 - DNA, 106 bp, Gossypium hirsutum
  Clone ID: LIB3493-016-P1-M1-C6
gagagaccaggcctaggatggatgcccacctgattgatcaaacaatcaagggatagcacgctattgaagctactatagagactcatgcgtgggctctacatgacaa

SEQ ID NO: 3459 - DNA, 378 bp, Gossypium hirsutum
  Clone ID: LIB3493-016-P1-M1-C7
aaggagattaaatttctttaatttttttctctttgttgacctaaatctcttttatttgcttctttcaccatgaccaagcagcaggctaactggtctccttacgacaacaatggaggatcttgcgttgcgatcgctggagctgattactgtgttatcgccgccgatactcgaatgtcaaccggttacaatatactgacccgagattactccaaaatatgtaaacttgcagataaatgtgtcatggcatcctcaggatttcaagctgacgtgagggctttacaaaagcaactggcagctaggcacttgatttatcagcatcagcacaacaagcaaatgagctgccctgcaatggctcaattgctttccaacacactttat

SEQ ID NO: 3460 - DNA, 381 bp, Gossypium hirsutum
  Clone ID: LIB3493-016-P1-M1-C8
ctcaaattcagttaacaatttcacagttgttttcttcagtctctctctcagccatggctgcagccatctccaccgtcgctgccgctgccgccgccaaccgagctctgggagtgtcagtcccaacctcagctttcatggggaagaaagtgagctcaagattcaacagcaccaggcaggttccttcgggaagttttaaggtgatggcggctgagaaagagatagacgaagagacacagaccgaaaaggaccgatggaaagggttggcttacgatatttcggacgaccaacaggacattactcgagggaaagggatggtgattccttgttccaagctcccatgaatgatggaactcactatgctgtcatgagttcctatgaata

SEQ ID NO: 3461 - DNA, 381 bp, Gossypium hirsutum
  Clone ID: LIB3493-016-P1-M1-C9
gctttaagcaaaatatgaggtttgcagtagcagctaaagctgccttgctcctgcacctttcccttttcgtactgagtagcttcacggtgtcctctcagatcttgcctgaggctttgcctcctcattaccatggaatttcgcctgtagtgccacctgctcacccaccaagccaccaccatcaccatcaccatccccatccgcatccccacccgccaaccccttcccctactaagcccccaactcacccgcctgtttaccccccgcccaaagcacccaagattgctccagtttatccaccacccaagtcaccaagcaagccttcaacttacgctcctccacccaagtcacccagcaagccgccaagttacgcctcttcaccca

SEQ ID NO: 3462 - DNA, 330 bp, Gossypium hirsutum
  Clone ID: LIB3493-016-P1-M1-D1
tgcatttatcagtgaaattattgctctacacaagtttcttagcgagtatggaccagatgatgatgaccaatcgctatttcaagtatttggttctcacaaagggaaggacaaggcaactacaggtgccattaatggcattgccaggcttcaagcactccaatctttgcgaaagttgttggatgatccaatcaaacttgtcccgttctcctttttgcaaaaatgcacccggtggggatgctgttttccaaactctagctgtaaaataattgggggggtcatttagttgcagaacttacagaatgcggttatcctcaagctcaaggaatgagc

SEQ ID NO: 3463 - DNA, 320 bp, Gossypium hirsutum
  unsure (1)..(320): unsure at all n locations; Clone ID: LIB3493-016-P1-M1-D10
aatcagtgtatcttctttccaggccctcctaaagatgtcaaaaattgacaataacaatgctccatggcaccgtctcaagcgtgcttccacaccaaggaaggcaacggtgcttgccatcggtaaggcctttccacggcaactaattcctcaagaatacttggtggagggctatatacgtgatacaaaatgccaagatgtctccatcaaagagaaactggaacgtttatgtaaaacaactactgtgaagactaggtacacagtgatgtgcaaggagattntagatcaatacccagaattggcaacttagggttcatcaacta

SEQ ID NO: 3464 - DNA, 328 bp, Gossypium hirsutum
  Clone ID: LIB3493-016-P1-M1-D11
gatctttccaacaatcacttgactgggaatatcccagagagtctgggtgaactgtcgtataacaccatcaacttttcaaacaatgaactttatggtccaattcctctctcgttgattaaagacgggttggtggaaagcttttcaggcaatccaggtctttgtgctcctgtcgaagttcaaagtttccccaaatgttcacacaagcacaaccaaaagaagcgaaattctatgtgggcaatcatgatatcagtcattgtctttactatcggagccatcctgttcctgagacggcgttacagcaaacaaaagaggtgtagtaaaaacatga

SEQ ID NO: 3465 - DNA, 283 bp, Gossypium hirsutum
  Clone ID: LIB3493-016-P1-M1-D12
atatttcccaggaaaaagaaaaagcttgagccaaaagaaaatggccgatcagcttaccgacgatcagatctctgaattcaaggaggcctttagcctgttcgacaaggacggagatggttgcattactaccaaggagttgggaactgtgatgcgatcacttgggcagaaccccactgaggcagaactgcaagatatgattaatgaagtcgatgctgatggaaatgggaccattgattttcctgaattccttaacctgatggcaagaaaaatgaaggatacagac

SEQ ID NO: 3466 - DNA, 339 bp, Gossypium hirsutum
  Clone ID: LIB3493-016-P1-M1-D2
caatcttattataacaagttttgagttcgcaatgggattcttggatctattagttgtggcattggtgccaattctaaaagtgttactggtaactggtgttggtttgtttcttggcatagaaaagatcaacctgttggggccggaggcaagagactacttgaataaaattgtattctatgtattaagtccttgcctcttattcagcaacttggccgagacaatcacttacaaaagtttggttaccttatggttcatgccactcaatgttcttctaacatttctcgttggctcagcttcttggttggattcttgcaaaactaactaaaactcctagacacc

SEQ ID NO: 3467 - DNA, 391 bp, Gossypium hirsutum
  Clone ID: LIB3493-016-P1-M1-D3
ccgaaaactgaacttgtgttgcattgtgtttgacttcactgacccgacaaaaaatctcaaagagaaggatctcaagcggcaaaccttgcttgagcttgtggattatgtttcatctgctaatggaaaattctcggagattgttatgcaagaaatcgtgaagatggtatctgtaaatttgtttagagcgctaacatcttcgccccgtgagaacaaggttctagaagctattgatttggaagatgaagaaccctcgatggaccctgcgtggcctcatttgcaagttgtttatgaatttctcttgagatttgtggcatcacccgagacagatgcaaaattggcccaacggctatatgatcactcttttgtctaaaggtggttagatcttttcgat

SEQ ID NO: 3468 - DNA, 103 bp, Gossypium hirsutum
  Clone ID: LIB3493-016-P1-M1-D4
ggagcttgtttcgttgttttcaaaagaaatggagttggttcatcttggtcctgaaaatgtggaaagtacagataagtttttgacaacggtccaccgtgaggtc

SEQ ID NO: 3469 - DNA, 402 bp, Gossypium hirsutum
  Clone ID: LIB3493-016-P1-M1-D5
cctgcatgtgcctctgccgcgaatggagttgctatgttggtatggattactgattttgaagccaaaatctcccctccctcacctcgaacaatcaaacctgaagcagatcttgcatgttgctgatcgaaagctgcatcaaagaagactgacacactcgttcttctttcttcagttctcggaccaccatttcctgccaaattaccaaagcccataacagaaaagtcggcactgttcatttgaccctagactaaaaacccatgacatctacgaaagatatgattacaatcatcctcttcttggttgcatcgaggacactgggcatcagcaactatacgtttaatcttcagattaagcaaaagtagaatgtaattccaagagattccccaatattgtaattttgac

SEQ ID NO: 3470 - DNA, 374 bp, Gossypium hirsutum
  unsure (1)..(374): unsure at all n locations; Clone ID: LIB3493-016-P1-M1-D6
cacgcaagcaacgaaacctgcccattgcttctttccatgtccaattcccctgtttcttactcaataacctaaagcttttaagtttcttcttcatcttcaagtttaagacatgtcgagctcgggggtagtgcgaagaggaattcattatttgcaaaagctaaaagccgcgaatataccttctgatttgatagaaaagggccaaaatcgtgttatcgatgcgtctcttacccttattcgggagagggcaaagctcaagggagaactngtgcgtgcttntgggcggtgctttagcatcaacatcactgctttgagttcctttaggacataattcatcgttcttcaaggacccgcttttgctccttctcgtattcggg

SEQ ID NO: 3471 - DNA, 376 bp, Gossypium hirsutum
  Clone ID: LIB3493-016-P1-M1-D7
cgaagcttccttttccgttttagatctcaaaattcaaaaggctctctttttcatctcatggctgctactattgtctccgtcaaagctaggcagatcttcgacagccgtggaaatcctacggttgaggttgatgtggaaacatcgaacggtataaaggctagggccgcagttcctagcggtgcatccactggaatttacgaggctcttgagttgagagatggaggttccgattacctcggtaaaggtgtatcgaaggctgttgctaatgttaacacaatcatcggccctgcattgattggaaaggacccaaccgagcagactgcaattgacaatttcatggttcaacaactggatggaacccaaaatgagtgggggt

SEQ ID NO: 3472 - DNA, 403 bp, Gossypium hirsutum
  Clone ID: LIB3493-016-P1-M1-D8
ggaaccaactgttacacacagcggcagcagcagccatggtgaagtactcaagagaaccggacaaccctactaaatcttgcaaagctaggggttctgaccttcgtgttcattttaagaatacacgagaaactgcctttgcaatccgaaagctacctttgacaaaggcaaaaaggtacttggaagatgttattgcccacaagcaagcaattccattcaggcgcttctgtggtggagttgggcgaaccgcacaggctaagaattgccattctaatggacaaggccgttggcccgtgaaatctgcaaaattcattctcgatttgctcaagaatgccgagagcaatggctgggttttaattttcgggaatgtggtttaattttcgggagttgtctgtttttccttctg

SEQ ID NO: 3473 - DNA, 387 bp, Gossypium hirsutum
  Clone ID: LIB3493-016-P1-M1-D9
gtttggcacgccgctgatttcgctgatgggaatttgaaagaagagatgttctgtatcagatttccttctgttgagaattgcaagaccttcatggagacagttcaagaggttgctgaaagtcagggaaagaaagaggaaaacaaagacgccacagtcactgctgatctcctcgacaagttgagtgttggagaaattaaaagtgatggtaaagaagatacggtcgttgcctccaacaccaaggaagccgtcaaagatgaagcaaaaacagaggaagataagaaagatgaggctgcttcaaaagcatagacctgaaagagaaagcaacaatatacctcgagtagtttattatatataattaataaattagtggttaagggagaaaatatc

SEQ ID NO: 3474 - DNA, 358 bp, Gossypium hirsutum
  Clone ID: LIB3493-016-P1-M1-E1
tgcagccatggttggaggggaaaaaagtgcagaagatgtgcaaaaacactatgtcgtgcttttggaggatttgcagtatatagagtcgggcaaacttgaccaaaaacttggtggtgaacctcaatcagtatgctggactgatggagataataagtacacatatataatctctttcttttctgatcatagcttcttaatgttttgattctcttctcccaattctttttgttgatatttatgatgtttgtagtattttgggttcgattggacataaactgatccatctccacagcttagacactgctggttgctgatgctgaccgccatagcttatgttccataagaacgcagagcattt

SEQ ID NO: 3475 - DNA, 463 bp, Gossypium hirsutum
  Clone ID: LIB3493-016-P1-M1-E10
gaagattgttccaagtggctgtcgtgcgatgattggccaagttgcaggtggtggtaggactgagaaacctctcctcaaggctggtaatgcttatcacaagtttagagtgaagaggaactgctggcctaaggtgcgtggtgtagctatgaaccctgttgagcatccccatggaggtggtaaccatcaacacatcggtcatgctagtactgttaggcgtgatgctcctcctggacagaaagttggtcttattgctgctaggagaactggtaggctcagaggacaagctgctgctacagctgccaaagctgacaaggcttaggcttaggcttaggcttaagatattacttgctgtaattttaagttcttttggtcttcagattttacattcaaaagtgtttaagacctttatgcttgaaaatgtgtttgaattatcaagatattggtactggttttgagtggtttg

SEQ ID NO: 3476 - DNA, 138 bp, Gossypium hirsutum
  Clone ID: LIB3493-016-P1-M1-E11
tggaaactctcccgaaactgaggttcttgcagatctttttgcagagtgattggtggattacttgaatgaatatgcttattatgctcgggttgctggtcttctttatggcataagccacacagatagtggtttcgaggt

SEQ ID NO: 3477 - DNA, 485 bp, Gossypium hirsutum
  Clone ID: LIB3493-016-P1-M1-E12
caaagatcaagaaaaatgaagatggtattggtgcttttcttgcttgtttctcttgctctcagctcttgtttcttcgaggtgtcgattgccggttcggatttttgtgactcaaagtgtgcggtgaggtgctcaaaggcaggggttcaagacaggtgtttgaaatattgtgggatttgttgtgagaaatgtcattgtgttccatctgggacatttgggcataaagatgaatgcccttgttatagggacatgaagaactctaagggcaaatccaagtgcccttagatgtttttttccccataattacttgtatgtatttattttgcctttatacccttataaagatttaacaaaatgatgttgtgggaagacccttaatcttaactatgtaaaatatactaaatgaataaattgggccttaagattgtgatttatgaatatgccggtgtggtggtatttatatatattaattaatatggggtttgttt

SEQ ID NO: 3478 - DNA, 364 bp, Gossypium hirsutum
  unsure (1)..(364): unsure at all n locations; Clone ID: LIB3493-016-P1-M1-E2
cccacgcgtccggcttattgactgtgtgagaaacccagctttcttggattgggaggtgaatgaacagcttcaaaaaatgaaagaggaaattgctgaagctgcaaagaatcctcagggcttgctcttagaggccattcactcagctggttattctggtgcattggcgaattctcttttagcccctgagtctgctgtaaataacatgaatnggacaagttttggaggattttatcctggaaaactttaccgcttctcggatggtacttgcagcatctggtgttgaaaacgaggaactgttatctgttgccgagccacttttaatagatctttccaatgttnctcgtcctcaagagccaaaatctgg

SEQ ID NO: 3479 - DNA, 265 bp, Gossypium hirsutum
  Clone ID: LIB3493-016-P1-M1-E3
gtccactacggaagtgccactgattgcaacgtcggagactcaatcctcttcatctcctccagaaaacgagtcgggggcggaaatatttaagtccgagagaacccggaaatcggaaactggaaatgaaaggaagggaaaggttaaaaacgatgaaatatttgaagggaaacatcaaacatacaggggagtaaggatgcgtcaatggggcaaatgggtatctgaaataagggaacctaagaagaaatcaagaatttggctgggcaca

SEQ ID NO: 3480 - DNA, 341 bp, Gossypium hirsutum
  unsure (1)..(341): unsure at all n locations; Clone ID: LIB3493-016-P1-M1-E4
aaaaaggaagagagaaatggggagaggaagagtggagctgaagaggatcgaaaacaagatcaacagacaggtgaccttctccaagagaagaaatgggttgctgaagaaagcgtatgagctttcagtgctttgtgatgctgagggtgccccttatcatcttctctaatcgtggcaagctctacgagtntggcagctcaggtatgaccaagacccttgagcgataccaacaatactgctntactcctcaacctcaacacaacatccctgaacatgaaacacagagttggtaccaagagataaataagttgaaggcaaaatatgaagcacttgaacgcactcaa

SEQ ID NO: 3481 - DNA, 385 bp, Gossypium hirsutum
  Clone ID: LIB3493-016-P1-M1-E5
gacctcttcattcgtgaaggtttccagtttgattacgtgtttgattggacaatcctaaagtatcagcaatctcagattgccaatcctcctacccgtgctcttggccctggtgctggaactagctctggcttacctcctgcaggtgcaattgctgataggcagtcaggtgaagagaccagaccttctggttggtcttcagcagatcctacacgcaggaggcattctggcctgattgcaaaattcttgaagtttagctaaacaaaaaagtccagtagctaatgatctttctgcttgctaaagaatcctatgttggctagttctaatttcttgcgttcaagtgatcttcgaggcgaagctgctgttcctagcagcgtgatgccgcaac

SEQ ID NO: 3482 - DNA, 377 bp, Gossypium hirsutum
  Clone ID: LIB3493-016-P1-M1-E6
cagtaaactattccacgttaatgtttttgcatgcaaaaacattaccctcgaacgtttcacggtagaggcaccggcagatagcccaaacacagatgggattcacatgggcaaatcagacggcgtaaatattattggatgtgagattaaaactggtgatgattgtatttctatcggagatggcactaaaaatttggacataaaagatataacttgtggaccaggacatggtataagtatcggtagtcttggaaagtacccaaatgaagagccagttgagggagtaaagtcacaaactgcaccatcactaatacttcgaatggagctcgaatcaaaacttggccaggcgaatctcctgggatagtatcagatgtacattt

SEQ ID NO: 3483 - DNA, 442 bp, Gossypium hirsutum
  Clone ID: LIB3493-016-P1-M1-E7
gtttgggttctggggattttgactttcccgggaaagttcgggaaaaataagagagatggttagaataaggaaaataccactggacttaacgcttactgagtttccagctctggtttctagctggtgggacgaagttaatgaatcgactcactggcaagatggcatattttacacactttgcgccgcttatgccttagtttcctccattgctctgatacaattaataaggatcgaattgagagtacccgaatacggttggactacgcaaaaggttttccatcttatgaatgtcattgtgaatggagtgcgcgccgtcgtgttcgggtttcacaaacaagtatttttattgcatcccaagggacttatattcgtactcctggatctttcaagccttctgtttttcttcacgtatccttactagccctgtttgggcagagattat

SEQ ID NO: 3484 - DNA, 271 bp, Gossypium hirsutum
  Clone ID: LIB3493-016-P1-M1-E8
attcgtttctccagtgacggcaaacatcgaacccgacggtgattatgaagattatataagaactgagcttctttatcaaacggggttatctcaagaccccactaactccctcctcctcgccaattacgctcagtttctctaccttgttgcacatgattatgagagagcggaagagtacttcaagaaagcggtaacagtggaggcggtggatgcggaagcgtacagtaaatacgcaagctttttgtggaaagcgacgaacgatttgtgggca

SEQ ID NO: 3485 - DNA, 379 bp, Gossypium hirsutum
  Clone ID: LIB3493-016-P1-M1-E9
tgattttctaccgcaagggaccaaagccaccaaagaagggccaacccgaagatgcagtgtatgactttgaagacaagatcaactttgcagttttcccttcccttcagggtggtcctcacaatcaccagattggtgccctggctgttgccttgaaacagtccatgacacctgggttcaaggcatatgctaaacaagtgaaggccaatgcagttgcccttggaaagtacctgatgggcaagggataccagcttgttactggtggaactgagaaccaccttgttctttgggatctccgacctcttggattgacttgcaacaagggtgagaagcttgtgacctctgcaacatcacttgtaacaagaatgctgtttttggtgac

SEQ ID NO: 3486 - DNA, 375 bp, Gossypium hirsutum
  Clone ID: LIB3493-016-P1-M1-F1
ctctctcgttgttttctgtataataataagattgagaagccgattaaaagacgttttgtgagattagagaatgagtagtgtagttaggaatcaaggaagctgcgttgcgatccgctctctctctccttcctcttccattaaccgttgctctcacgcctctgcttcttcagatggtgcgacgtgtggaaggccagcttggattggtaagcgcctaacttgtgtttgtttcaagcgaaagggagtttatgaagggatctgctttaacatcacacccaaacaggaggaaaggttgaataggttgaggcaccgtattgaagggtacttcgatggttcccagccctgatcaccaggaagcctctaagagcaactatggtc

SEQ ID NO: 3487 - DNA, 475 bp, Gossypium hirsutum
  unsure (1)..(475): unsure at all n locations; Clone ID: LIB3493-016-P1-M1-F10
cgctcaggaacctatttctgtatggataagggagttacttctgttgtaatcaagggattggcggagcataaagattcgttgggtgcgccactttgcccttgtaggcattatgatgacaaagctgccgaagtcaatcagggattttggaattgtccatgcgttcctatgagagagaggaaagaatgtcactgcatgctctttctcactccggataacgactttgctggccaagatcagaccataacattggaagaaatcaaggaaacaacagcaaacatgtaacacttgacggtttcaaattttgtttcttaaacagtcataacttgttttttggccctcgaaaaaagaaaaacagaacagaggtcgaattttatatgtatatttgatgtcaacagggggataaattctttttttttttgttgcacctcctataatatgctattataagtattaacttatttgatcaaaanaaaaa

SEQ ID NO: 3488 - DNA, 375 bp, Gossypium hirsutum
  unsure (1)..(375): unsure at all n locations; Clone ID: LIB3493-016-P1-M1-F11
ttgatgatgaccagaaacttcgagccttttttgacaagaggatctcacaggaagtcagtggtgatgccctcggtgaggagtttaagggctatgtattcaagatcatgggaggctgtgataaacaaggttttccaatgaagcaaggagttctcactcctgggcgtgttcgtcttttgcttcacagaggtactccctgcttccgtgggtatggtaggagaaatggagagcgtangaggaagtcagttcgcggatgcattgttagtcaggatctttcagttttgaacttggttattgtgaaaaagggtgaaaatgatcttcctggactgactgacactgagaagccaagaatgaggggtccaaagagagcatcaaaaa

SEQ ID NO: 3489 - DNA, 306 bp, Gossypium hirsutum
  Clone ID: LIB3493-016-P1-M1-F12
cccacgcgtccgctcgccgcagcagtgggtgtggaaagaattgccttagaagctgctgcatcccaggagcgaagcttcctttatatgctttcaggaaactgaacaatattgagagtgaaaaagtggtgcttggaattgagaacaaagaaccccctgttgcttttcttgactcgctcattcttggggagtgggaagatcggatgcaaagagggctctttcgctatgatgttactgcctgtgaaaccaaggtgattcctggtgaatatggcttcgttgcccagctgaatgagggccgccaccttaaga

SEQ ID NO: 3490 - DNA, 379 bp, Gossypium hirsutum
  Clone ID: LIB3493-016-P1-M1-F2
ggccagatctactctgcaagtgtttcggaattcattcatggtgatctgccatgtctaaccggagatattggtggtgacattcaaatcgatttttcctgtgatccaaaaatctccttgaagctggttgatatagctttgaatgaaatattacgtcttcaagaggagggatcttcagatcaagatgttgaaaccatactcgaaatcgaacagagagcccatgaaaatggattgcaggagaactattactggcttaatctgattatcggcagttatcagtcacggatttattccggcgatattggaacttctttcaagattctagatgaaacgcgtttcaaagttagaaattcgctaacaccattaacgatgcaattggcgc

SEQ ID NO: 3491 - DNA, 392 bp, Gossypium hirsutum
  unsure (1)..(392): unsure at all n locations; Clone ID: LIB3493-016-P1-M1-F3
tctaccctcactccgccatcttcaataatttcttccgttgatctttgttagagattagctttttaatttttcattatgggaaagatcaagatcggaatcaatggatttggaaggatcgggcgtttggttgcgagagttgctctccaaagcgatgatattgagctcgttgctgttaacgatcctttcatcaccactgaatacatgacgtacatgtttaagtacgacagtgttcacggtcaatggaagcatcatgagcttaaggtgaaggactcaaagacccttctctttggtgaaaagcctgtcacagtnttcggtatcagaaaccctgaggaaatcccatgggctgaggcttgaaccttaatatgtggtgagtctactgtgttttactgaca

SEQ ID NO: 3492 - DNA, 370 bp, Gossypium hirsutum
  unsure (1)..(370): unsure at all n locations; Clone ID: LIB3493-016-P1-M1-F4
aaggacggttcctttgatttcgagagtagatattcgctcgcttctctctttcgtcgaactccgcgtaataatcgctcatatttcgcgcagacgtgaagaatgggctgtctttcacaaagctgttcagccggctttttgccaagaaggagatgcgtatattgatggttggacttgatgctgctggtaaaaccaccattctntacaagctcaagttggtagagattgtcaccacaattccaacccatggtttcaatgtggaaactgtggaatacaagaacatcagctttactgtctgggatgttgtggccaggaccaagatcgtccattgtgaggcattacttccaaaacacacaaggactcaattttgtgt

SEQ ID NO: 3493 - DNA, 367 bp, Gossypium hirsutum
  Clone ID: LIB3493-016-P1-M1-F5
tctaagtgtttacctatacatatatgtaacatcttcaatctttgtttccccaaattaccatgccaaagccattccatttgttggtattcttccttgttgctctttgtctatgcaccaattcaaatgccagcagtagtactaatgagttccttgaaactgagtgcttgaaagtaccagcaactgagtttataggttctttgaaaaccaccattgatgctatacgaaaagctacctctgttgtttctcaatttggtggcttttttcatgattttcgtctctctaatgccatttctgattgtcttgatctgctcgactcttctgctgatgaactaagttggaccatgtctgcttcccagaatcctaatgc

SEQ ID NO: 3494 - DNA, 351 bp, Gossypium hirsutum
  Clone ID: LIB3493-016-P1-M1-F6
aaaaaaaaaaaaaaaaagcttaacattttcagatccaactcattactctcttcaaaggaccaaaaagaagatggcttcaacattcagcggcgatgaaactgctcctttcttcggcttcctgggtgctgctgctgccctcgttttctcttgtatgggagcagcttatggtacagccgaaaagtggtgttggtgtagcatcaatgggtgtaatgagacccgagctggtgatgaaatcgatcgtcccggtggtaatggctgggtgctgggtatttatggttaatcaatcgtgtataatcagtactgggataacccaaagctaaatcttatacctttcgatgggatgctcattat

SEQ ID NO: 3495 - DNA, 407 bp, Gossypium hirsutum
  Clone ID: LIB3493-016-P1-M1-F8
cgtatatgtcatccgtaaaaggatcaaactcagtgctgaaaaggcaatattcatatttgtggacaatgttctccctccaactggtgccattatgtctgccatatatgaagagaaaaaggatgaagatggatttctttatgttacatacagcggggagaacacattcggggatcagatctctcagtagcctccggtaaatccatttccgatgcggcttttatctttcctcatttcaccgaccccgtgtattatctccagccttaccatttccattgcctttgggccggtaatttcgttattgctagtattatttaaagacatggtgaccatatggtgtacagctgaatatattgtatataaattttaagatttccacattatggtaaaagtccttttatttatcatcc

SEQ ID NO: 3496 - DNA, 425 bp, Gossypium hirsutum
  Clone ID: LIB3493-016-P1-M1-F9
aggtcatctaagagaaatattcggtaatttcggtgaagttgtaaatgtggatcttgcaatggaccgtgctcttaatcttccaagaggatatggatatgttgaattcaagacaagagcagatgctgaaaaagctctactttacatggatggtgcccagattgatggcaatgtagtaagagcaaagttcacacttcctccacgaccaaaagcttctccgccaccaaagccaattgcttctgctactactaaaagagatgctcccaaatctgataatgttaatgctgataccgagaaagatgggccaaaacgaccacgggaaccttctcctcaacggaaacccccgccttcaccacgaaagggatctcctgtgggtcgaagagggggtcttctagacgaccaccagagtcttctcgtcggcgacctga

SEQ ID NO: 3497 - DNA, 347 bp, Gossypium hirsutum
  Clone ID: LIB3493-016-P1-M1-G1
cccacgcgtccggacaataactatgacaatggtgacgaagatggtgatggttcttgtttttatggcagccaatactggtgtgaaatgggtcggagcacaagtgcatcacgtggtcggaggtgaccgtggctgggacccttcatttgacgttgcatcttggtcttccggcaggatcttcagggtcggagacaaaatctgtttcccctcctctgcagcacaggagagcatcgtagaggtaaagagcaaggatgaatatgagtcgtgtgatgtaggaaaccccataaggatatatacagtgggcttagatggcatcgaattggattgggaaggattcgatacttcatgag

SEQ ID NO: 3498 - DNA, 57 bp, Gossypium hirsutum
  Clone ID: LIB3493-016-P1-M1-G10
cagacgatctgtgtagtgactatataccattatttactggtaaataatacactgctg

SEQ ID NO: 3499 - DNA, 352 bp, Gossypium hirsutum
  Clone ID: LIB3493-016-P1-M1-G11
cggacgcgtggggcaaattgttgatacaacttgtccttgggtaactaaggtatggaacgtagtagagaagcacaagaaaggagactttacttcaatcatacatggtaaatatgctcatgaggagacaattgcaactgcatcttttgctggaacttatatcattgtgaaggatatgactgaggcaatgtatgtttgtgattacattcttggaggtgaacttaatggatctagctccaccaaagaggcttttatggagaaatttaagaatgctacttcagagggatttgatccagatcgtgacctagtaaaagttggcattgcaaatcaaactacaatgctgaagggagagaca

SEQ ID NO: 3500 - DNA, 272 bp, Gossypium hirsutum
  Clone ID: LIB3493-016-P1-M1-G12
ctttattcttcttctaatctcctttgaaaaagctttaattgccggaacttagctctcttaatttctttttaccgggaatgggattggaaggcgtggaaccgtcgtcgtttatggcagattttctagcaaggtgcggtggttatgcggtggtggacggtgggttggccaccgagcttgaacgccatggtcaagacctcaatgatcctctatggagtgccaaatgtcttatctcttttccccaactggttcgaagggttcacctagattacctt

SEQ ID NO: 3501 - DNA, 362 bp, Gossypium hirsutum
  Clone ID: LIB3493-016-P1-M1-G2
cggacgcgtgggggggcttttggcgacgaaaacaaccgcagctaacaaggacaaggataaggacaagaagcgcccggtttctcgttcatctcgtgccggtattcagttcccggtgggtcgtatccaccgtcagctcaagtctagggcttcagcacatgggagagttggggcaacagctgctgtttacttggcctctatcctcgagtacttgactgccgaggttcttgagttggctggaaatgcaaagcaggatctgaaagtgaagaggatcactccaaggcacctgcaattggctattagaggggataagaacttgacacccttatcaaaggtaccattggttggtgggtggtcatacccca

SEQ ID NO: 3502 - DNA, 369 bp, Gossypium hirsutum
  unsure (1)..(369): unsure at all n locations; Clone ID: LIB3493-016-P1-M1-G3
tcaagatctgccgagtactacaaacaaggtgctcggtttgccaagtggagaacagtagttagcattccttgtggtccttctgctctggctgttaaggaagctgcatggggacttgcacgttatgctgccatttctcaggacaatggtcttgtgccaatagtggaacccgagattcttctggatggtgaccaccctattgagaggactcttgaagtagctgagaaagtttgggcagaagtcttctactacttggctgagaacaatgttatatttgagggcatcttactcaagcccagtatggtaaccccaggggctgaacacanggaagaggctagtnctgagactatngccaaatatacgctcacaatg

SEQ ID NO: 3503 - DNA, 399 bp, Gossypium hirsutum
  unsure (1)..(399): unsure at all n locations; Clone ID: LIB3493-016-P1-M1-G4
gcctcctcaggggcaggcagatattaccctgaagcatgtgagcaatgtgaacaatccaccgctttcccgtttgtccatccctttttccgcataaatcttcctgtatttcaaaatatttcttattcataaaatagggtcacaccaatggctcattgataaagttgtgtttgtgaggttntgatttaaatcagtcttttatttgaaacctaccaacactactatcatgagcatgtgacatcaccgttcccgttgtcatccttttcgataaacttctgtttcaaaattcttatcataaataggcacaccatggtcattgatagttgtgttgtgaggtttgattaaatcagctttttattttaaactcgctattttattggaatgtaatggcttatttatatg

SEQ ID NO: 3504 - DNA, 442 bp, Gossypium hirsutum
  unsure (1)..(442): unsure at all n locations; Clone ID: LIB3493-016-P1-M1-G5
atttagtcaggagcctgngggctgatgaggttcttgactacaaaactcctgagggggtggctctcaaaagcccttctggtcgcaaatacgatgtaatcatccactgtgcacacaacattccttggtctaccttttcggctaatttgactccaaaaggaaaggtagtaaataccactcctggtttcggtactttgatgagtgttgctgcgaaaaagatttcatgctcaaagaagcaactcatacccttgtttacctcacctaagaaagagaacctcgattttcttgttaagttggtgagagatggaaagcttaagccaataatcgattcgaagcatcctctaagtaaggccgaagatgcttgggctaagagcattgatggccatgccacttgcaagattcttgggagccctagttatgagatactgatgctacttaattatac

SEQ ID NO: 3505 - DNA, 285 bp, Gossypium hirsutum
  Clone ID: LIB3493-016-P1-M1-G6
gttttgtctctaaacaaaatgtcgaacccatcttctataactgcaactgcagctcttcttctctcgctcatctctactgtcacttcccattactcttcctccaccttctcttcttccccaccggcgccacagtccaccgtctggcactccgcacgcgccacttactatgccgcatcggatcctcgcgacgccgtcggcggtgcttgtgggtatggagacctagtcaaggctgggtacggtatggcgactgtgggtttaagtgaagctttgtttcagcgtggacag

SEQ ID NO: 3506 - DNA, 387 bp, Gossypium hirsutum
  Clone ID: LIB3493-016-P1-M1-G7
gcttctctagaggtctggtctactcaacactttctcctccctcttagcaaccaaagactcagatccgctcggatttctttgtcccagaactagaatggagacctttctattcacatcagagtctgtaaacgagggacaccccgacaagctttgcgaccaggtctctgatgctgtgctcgatgcctgcctagcccaggaccctgacagcaaggttgcctgtgaaacatgcaccaagactaacatggtcatggtctttggagagattaccaccaaagccaacgtagactatgagaagattggtcgtgatacatgccgctccattggatttgtttctgatgatggtggtcttgatgctgacaattgcaaggtgctggttaacattgagca

SEQ ID NO: 3507 - DNA, 373 bp, Gossypium hirsutum
  Clone ID: LIB3493-016-P1-M1-G8
ggaaattaaatttctttaattttttctctttgtcgacctaagtctcttttatttgcttctttcaccatgaccaagcagcaggctaactggtctccttacgacaacaatggaggatcttgcgttgcgatcgctggagctgattactgtgttatcgccgccgatactcgaatgtcaaccggttacaatatactgacccgagagtactccaaaatctgtaaacttgcggataaatgtgtcatggcatcctcaggatttcaagctgacgtgagggctttacaaaagcaactggcagctaggcacttgatttatcagcatcagcacaacaagcaaatgagctgccctgcaatggctcaattgctttccaacacacttt

SEQ ID NO: 3508 - DNA, 345 bp, Gossypium hirsutum
  Clone ID: LIB3493-016-P1-M1-G9
cagcaatgtcattgtggggctaaatgacaccgtggaaagccttatggcttctttggagaagaatgaatcagagatttctccttccactttgtatgctattgcttgtgttcttgaaaatgttcctttcatcaatggcagcccacaaaacacctttgttccagggttgattgatttggctattcaaaggaactgtctgattggaggagatgacttcaagagtggccagaccaagatgaaatctgtcctcgtggatttccttgttggggctggtatcaagccaacatcgatagtgagttacaaccatctgggaaataatgatggcatgaatctgtcagcaccccaaac

SEQ ID NO: 3509 - DNA, 413 bp, Gossypium hirsutum
  unsure (1)..(413): unsure at all n locations; Clone ID: LIB3493-016-P1-M1-H1
gttaaatcatgcaaagggacagcattctggatggctcccgaggttgtcaataggaagggtcaagggtatggacttcctgctgatatatggagccttggttgtactgtgttggagatgttaacacgtcagattccatactattatttggaacatatgcaagcattgtttagaattggcagaggtgagccacctgcggttcctgattcattgtcgaaagatgcacgagattttgtcttgcaatgcctacaagtaaatccagatgctcgtccaactgctgctaaactctngcagcatccatttgtgaagaggtcttttcccacacactcaggctcagcatctcctcatctttggcgtcggatatgaatgtttagccatgatactaaattgcaacaactaatcaaaaagttacacat

SEQ ID NO: 3510 - DNA, 256 bp, Gossypium hirsutum
  Clone ID: LIB3493-016-P1-M1-H10
ttgggctgatcattggagtcaccggcatagttggcaatagcttggctgaaatcctccctttatccgacactcccggcggcccatggaaagtatacggggtggctcgtcggcccagacccaactggaacgccaaccatccaatccagtacattcaatgcgatgtatccgacccgaatgataccgaatcaaagctctctcaacttaccgacgtcactcatatcttctacgtcagctggaccaaccgaacatccgaagc

SEQ ID NO: 3511 - DNA, 369 bp, Gossypium hirsutum
  unsure (1)..(369): unsure at all n locations; Clone ID: LIB3493-016-P1-M1-H11
aagaagcctcctcggagaagtgatgattcactcatcactgcttggattttattccgctatctggtaattggactatatgttggagtagcaactgttggcgtcttcatcatttggtatacacacagttccttcttgtgcattgatcttagcggngacggccacacccttgtcacatacccccagctcgccaactgggcccagtgctcatgctggaaaaatctcactgtttcacctttcacagccgggaaccaagtcttctacttcgaaaataatccatgcgattacttccaaggcggcaaagtaaaagcaatgacactttccctctcggttttagttgccattgaaatgttcaactcccttaatgccctc

SEQ ID NO: 3512 - DNA, 283 bp, Gossypium hirsutum
  unsure (1)..(283): unsure at all n locations; Clone ID: LIB3493-016-P1-M1-H12
cattacctgaggtccatgcatgtactgcagggttaaaatctgttactacttctgcaactgcagatgcaatcgaagaatgccggaaattatgtggtggtcatggttatctttctagcagtgggctccctgagttnattgcagtttatgtccctgcctgtacttatgaaggcgacaatgttgtgctacttttacaggtttcaaggtttctaatgaagaccgtttcccagcttgggtctgggaagaagcctgtcgggacaatagcttacatgggacgatcagaaca

SEQ ID NO: 3513 - DNA, 394 bp, Gossypium hirsutum
  unsure (1)..(394): unsure at all n locations; Clone ID: LIB3493-016-P1-M1-H2
ctcagaacacacaaaaagagagcagacaaaaagaaaaatcgtaaatcatcgagtgggagtgggagtgggaatggcgaagaggaagcaagggttgggttggatcgaatggttgagaggatngatgtacgtgatctacgagatgcttttccagagaataacggcgagtcacctgcacaacccattagagttgccgcccttgagcgacctcacctgcatcgtaactggctccacaagcggcatcgggagggaaattgctaggcaattggctgaagctggggcacatgttgtaatggctgtcaggaatcctaaggcagctcatgagttgattaatcaatggtctgcctcttggcatgggctccctttgaacaatgaggtcatgcaaactgatcttcta

SEQ ID NO: 3514 - DNA, 400 bp, Gossypium hirsutum
  Clone ID: LIB3493-016-P1-M1-H3
ggaattcccgtccaggttcttgaccgtatgatcgcttccatcagagccttccatgagctgcccaccgacgtcaaggccagattctaccgccgtgacgccgaaaccggtgtatccttcatttccaacgttgatttgttccactctaaagccgctagctggagggatacactccagataagactaggaccaactcttccggagcttgagcacattccggaggtttgtagagacgaagtggttcaatggaacttacattcgacaacattaggagagcagctgattgggttgtgtcggaagggctgggattggataaggataccatcaagaatactacatgtttggatgccagagtaatggtgggcactactatccatgctgcccccagcctgatctgcagtgg

SEQ ID NO: 3515 - DNA, 348 bp, Gossypium hirsutum
  Clone ID: LIB3493-016-P1-M1-H4
ggtcattgcagtgacctccactggccttggtgagcagaaaaactactatccagctcctgaccctcatgctggaactcccccttcaggttcacatggcacaccaccatcttcaggaggtggatcacctccctctcatggaaccccgtcacatggaggtggttaccacccttcaccaacaccatcaacgccttcgggtggaaattgtggaactcccccacatgacccttcaactccatcaacaccatcacacactccttctcatggtactccaccatcatctggaggtggagtcccccatcgtatggaggaggcagcccccatcgtatggaggaggcagcccccatcata

SEQ ID NO: 3516 - DNA, 323 bp, Gossypium hirsutum
  Clone ID: LIB3493-016-P1-M1-H5
ccctcttttttttttttaaatagatttaggctatttttaaaaaaaaaggaaaacacaacaaaaaaatgaaataatggttgaatagcaaggggagaaaactcccgtcttcgccgctcctccgaccctcgtcgaaacccgagtgggttttgtgacgtttgggtcaccggaggttctcaaccgcgacagagaacgaaccacggtaagattgtattattatttatgcttttattttgaataaataaataaatgaggcacctttaaaaaacaaattaacccaaattttcaagggcctcatttatttatttattcaaaataaaagcata

SEQ ID NO: 3517 - DNA, 348 bp, Gossypium hirsutum
  Clone ID: LIB3493-016-P1-M1-H7
caaaatcatgaggagcatttgtgttgtgcttgttatctctttgcctttccttctcggcattgcccagggtttcgatttccacgacaatgatttagcgtcggaggatagtttgtgggatctatacgagcgctggcggagccaccacacggtttccaggagtctcgacgagaaacatcggaggttcaatgtgttcaagcagaatgttttgcatgttcacaacaccaacaacaaggacaaaccttacaagttgaagatcaacaagtttgctgatatgaccaaccacgaatttaggaatgcttacgctagttccaagattaaacatcataagatgttccaaggacagtcccg

SEQ ID NO: 3518 - DNA, 306 bp, Gossypium hirsutum
  Clone ID: LIB3493-016-P1-M1-H8
gattactatactgtgtgatgctaaagtttctcttattatctttggtagttctggcaagatgcacgagtattgcagcccttctactaatttggtcgatattttggaccaatatcagaagacttccgggaagaagttatgggatgctaaacatgagaatctcagcaatgaaattgatagaatcaagaaagagaacgataacatgcagattgaactgaggcatttgaaaggggaggatatcacctctttgccttacaaggagctgatggccatagaggatgcccttgaaaatgggcttacctatgtcgt

SEQ ID NO: 3519 - DNA, 371 bp, Gossypium hirsutum
  unsure (1)..(371): unsure at all n locations; Clone ID: LIB3493-016-P1-M1-H9
tcaaagcctctcgtctcctctccataaatctctcactcaacgcagagcgaataggcggagacttccaagaatctatcgcatcagctaatcacgctctaaagaatggatcaggttcaacacccatctatcatgcagaaggtagcaggccagctccttcgttctagccattctcaagattttcaaggttataatgggtctttcaggagtcctgctctatgccaaaggcgtgctgcatatggcaattactccaatgctgcactgcagcatcctgtccgggcttgtggagacctgtctatggttccatcaacagcttctgctatntgcgttcaggctcctgctgagaaaggatttagcagctttgctattgattt

SEQ ID NO: 3520 - DNA, 404 bp, Gossypium hirsutum
  unsure (1)..(404): unsure at all n locations; Clone ID: LIB3493-018-P1-M1-A1
cttttgttctcagtacaaggttggagatttagatgcttggggcattccaacatcagcaaatccccaagtatatgccaaatggtccaaaaaccattccttcaagctcggagactctctcttgttcctatacccaccaagtcaagattcagtgatccaagtgacggaacaatcctacaacagttgtaacctcaaagatccaatcttgtacatgaataatggcaactcactgttcaacatcactaagcctggggagtatttcttcaccagtggggagcctggtcactgtgaaaagaagcagaagctntacattcgcgtgctttcaggcaacggctctgcagcacttggctcttcttacggtccatctgcattaccggacactggatggtcaccgtcttacaacgact

SEQ ID NO: 3521 - DNA, 425 bp, Gossypium hirsutum
  Clone ID: LIB3493-018-P1-M1-A10
cagatgaagcacccgacacagttactggggatattgtatttgtcctccaacagaaagatcatccaaaatttaaacgaaagggtgatgacttatttgtagaacatacgttgacacttactgaggcagtttgcggcttccagtttatactgacccacctagatggtaggcaacttctcattaagacccatcctggtgaagtggttaagcctgatcaatgcaaggccataaatgatgaagggatgcctatgtatcaaaggccattcatgaggggtaaactatacattcactttaccgttgattttcctgactccttggcccccgagcagtgcaaggcactcgaggctgtgctaccttcgagggcctcagtccagctgacagacatggagctggatgatgtgaggaaacaactctatatgatgtcaaca

SEQ ID NO: 3522 - DNA, 431 bp, Gossypium hirsutum
  unsure (1)..(431): unsure at all n locations; Clone ID: LIB3493-018-P1-M1-A11
gttaggagaactgctgttttagcgctggggtttgtcctttactcagagccggagcagactcctcgaattgtctccttactgtctgagtcttacaaccctcatgttcgatatggtgcggcacttgcagtgggtatttcatgtgctggcactggattgagtgaggccatatcattgttagaacccttgacatcagatgttgttgattttgttcgccaaggtgctcttattgcgatggctatggtcatgattcagatcaatgaagcaagtgattctcgtgtcgggacattcaggcgtcaacttgaaaaaattatactggataagcatgaagacacaatgagcaagatgggagcaatcttggccttcgggatccttgatgctggtggaagaaatgtaaccataagattgctntccaagacaaagcatgacaaaat

SEQ ID NO: 3523 - DNA, 417 bp, Gossypium hirsutum
  Clone ID: LIB3493-018-P1-M1-A12
ctgacgcgtggttttgtattcacatcagagtctgtatacgagggacaccctgacatgctgtgcgaccagggctgtgatgctgtgctcgatgcctgcctagctcatgaccctgacagcaaggtagcctgtgaaacatgcaccatgactaacatggtcatgggctgtggagagattaccaccaaaggctacgtagactatgtgaagattggtcgtgatacatgccgttccattgcatgtgcatctgatgatgtcggtcttgatgctgacaatctgtaggtcatgcttaacatagagcagcagagccctgatattgcccaaggtgtccacaggcactttacaaagcgtcacgatgagattgtgaccggtgaccagcgtcataatgttggtatgccactgatgaaacctctgaattcatgc

SEQ ID NO: 3524 - DNA, 525 bp, Gossypium hirsutum
  Clone ID: LIB3493-018-P1-M1-A2
acgcgtccgtttgaagttccggcttcacgcgcggcttgggaagctgccgaattacgtggtggtggagcagcgttacttcgacgtgaaggagtttccggcgaacgacgaccacccgtcgcatgacgtggcgcgtgggcagaggttcgtgaaggaggtgtacgagatactgagaagtagcccgcagtggaaagagatggcgcttctgatcacgtacgatgagcacggagggttttatgatcacgtgccgacacctgtgtcggtgttcctaacccggacggaatagttggacccgacccgttttatttcaagttcaatagggcttggtgttagggtccccactctcttggtctctccctggatcgataaggcaactgtgatccacgagccaactgggccaacaccgtcttcccaatttgaacattcttccatccctgcaactgtgaagaagctcttcaacctgaattcaaatttcctgacaaagagggatggctgggctgctacatttgaaaatattttaagctacgt

SEQ ID NO: 3525 - DNA, 445 bp, Gossypium hirsutum
  Clone ID: LIB3493-018-P1-M1-A3
gaagaaaataaacaatttactctttttattaaaaggaaagaaggaggaggaggaaatggatggaaaaagaatcgagggcaatgaagtttatgctctagcaatgtgtgtaagtattctcctctttgctccgattgttgtgtcacaaccaataccggcagataaatcccaagtggaagcttggtttaatggcattatcaagccggtgaaggaaaggggtacaaccttagaccctgaattggttcaagccgagacagaacctagaatcataaaggtgatgcaagggtgggggtggaaattcgataccataaccaaagccatcgagagcgttccatcagggaacgccaaacgcgtgattatatccatcggaccctgatcttacaaagagaaaattagaattgaaagaaataagcctttcattacatttgtttaggaatctaaaaacatg

SEQ ID NO: 3526 - DNA, 387 bp, Gossypium hirsutum
  unsure (1)..(387): unsure at all n locations; Clone ID: LIB3493-018-P1-M1-A4
atttcctttggtttaaggggaaaaaaaaaaactgatcttctttccttatttccttttcatcagaaatcagagaagcagaaaatttcttcttctttattagaatcttccattctctctctctccatctgtctcaaatttcccgccttcttttcatctcttcatttgattgtcttccttgttttcgttcaattttattgaagccttttccacgaaaataattcactactttttgttttcttttcgtttttattcaataatgtggctcattgatccaataatttccgactntnttgattaatttattattttttgattaattctattggaataatcaatagaattttaatcaatttattatggatccgggttgcggtggaaatttaaaat

SEQ ID NO: 3527 - DNA, 366 bp, Gossypium hirsutum
  Clone ID: LIB3493-018-P1-M1-A5
gttggctcgtaagctttcttcgtgctctccaagcaagtttgagaaattttattttttagcaatcaacagtgatggcttcatctctagctctcaagaggctcctctcatgcaacatcctccctagctccttgcgggtggtccgcccaatggccatcgctccatcctcctccaggctctttaacaccaatgccatgcgtgagttcgacgacgatggtgatgagcgtgacctcagtgatgaacgccagcgttcactttctcggcgcggtgacggtttcttaacagaggtgttcgatccttttgctccaacaaggagcctgagccaagtcctgaacatgatggatagttcatggagagcccatttttttc

SEQ ID NO: 3528 - DNA, 378 bp, Gossypium hirsutum
  Clone ID: LIB3493-018-P1-M1-A6
cagaatcttcccttgactatggagcaatcttcaaagaaatgatccgatcgactccacttccaatgagtccactggagagtcttgcatcctcagctgtacgaacagctaacaaggccaaagctaaactcatcgttgtcttaacccgtggtggaacgacagccaaattggtcgccaagtacagaccagctgttcctatcctatccgtggtcgtcccagtcttgacaaccgattcatttgattggacctgcagtgacgaaggtccagccagacacagtctgatatataggggcttggttcccatcctggcagaagggtcagccaaggcaactgatgccgaatccaccgaggtcatcttagaagcagcaatgaagtcagcta

SEQ ID NO: 3529 - DNA, 383 bp, Gossypium hirsutum
  Clone ID: LIB3493-018-P1-M1-A7
acggctacaaggagcagtaccatccaaaatgcgatgtctgcaaccactttatttcaacaaaccctgctggtcttatggaatatagggcacatgctttttggatgcaaaagtactgcccttctcatgagcatgacggtactccacgatgctgcagctgtgaacgaatggagccacacgacacgggatatgttgcccttaatgatgggcggaagctctgcctagagtgtctggactctgcagttatggatactaagcaatgccaacccctttatctggatatacaagaattttatgaaagcttagatatgaaagtggagcagcaagttcccttactcctggttgaaaggcaagctttgaatgatgccagagagggagaaaagaat

SEQ ID NO: 3530 - DNA, 425 bp, Gossypium hirsutum
  Clone ID: LIB3493-018-P1-M1-A8
cccacgcgtccgctgctgcctgcctcctatctcttcaacgttcacaatgggcgcatttcaccgactcaacttgctccatttcacgctctctttagttgtcattgccgtcaatggccacaatataacggccattctcgaaggttttcctgattactctgtttacaatagtttcctcacccaaacaaagctggccgatgagattaacacccgagagaccatcacttgccttgtcctcaacaatggggctatgtctgccctcacatccaaacaccccctttccgtcgtcaaaaacatcctcagccttcacgttcttctggactactatgacccccaaaagctccacaaaatctctgatggcactaccctcaccaccacgctttaccaaactactggtaatgcccctggaaaccttggtttcgtcaaca

SEQ ID NO: 3531 - DNA, 443 bp, Gossypium hirsutum
  Clone ID: LIB3493-018-P1-M1-A9
gcaaataaaactttgaattattcatacaaaacaatgaaaacccacttttttcccctggtttttctcctcatttttttcttagcccaaggtctgaaccccaaatgtgccatccaagaccatggctcaaacctgcaagtgttccatgtttacagtccatgctcacccttcaaaccctcaaaaccactctcatgggaagaggatgtgctgcaaacgctagccaaggaccaagccagggtgcagtttttgtccagcctggtggctaagaaatctgtggtgcctatagcttcaggcaggcagattgtgcaaagcccaacttacattgtgaaggccaatattggaaccccacctcagcccatgcttatggccatggatacaagcagtgatgctgcttgggtgccttgcactggctgcattggctgctcttctactgcttttgactttgc

SEQ ID NO: 3532 - DNA, 512 bp, Gossypium hirsutum
  unsure (1)..(512): unsure at all n locations; Clone ID: LIB3493-018-P1-M1-B1
gcccctcttgataaagtctgtcccattagctgtgggatatgtacaggttttggggccactgtgaatgttgctaaacccaaaaagggtcaaactgttgcagtttttggactgggtgccgttggtcttgccgccgctgaaggtgcaagggtttgtggggcttctcggatcatcgctgttgatgtgaaccccagaagatttgaagaagctaagaggtttgggattacagaatttgtgaatccaaaagactacgacaagccagttcaagaggtgattgtggagatgaccggcggaggagtggatcgcagtgtggagtgtacagggagcgtccaagccatgatttccgcttttgaatgcgtccatgatggtttggggntggttgtgcttggttggggccaaagaaagacgatgcattcaaaactcatccaatgaatctactaagtgagaggaccctttagggtgcttttatggaactataaccaccactgtattccccatgtgcgacaatattgaac

SEQ ID NO: 3533 - DNA, 383 bp, Gossypium hirsutum
  Clone ID: LIB3493-018-P1-M1-B10
cgcagttgccttggtgccttagttcatagtttgccacattacggtggactttacaagcaaaataaagtgtatattatatttgttgctttctcctacatctgatgcttcttcaattttggatggaattacatttaagtattgtcattgatgtagattatggagttgttggtattcaccatgttggaattctatgtgaaaaccttgaaagatcgcttgaattttatcagaatattttaggtatgtaatctcttttctatactcatattatagatattgatttatttttgcaagaaagaaagagagaaactgagcatctgcttctaaatgttaaattaggtcttgaaataaatgaggctaggccacatgataagcttccatacaga

SEQ ID NO: 3534 - DNA, 502 bp, Gossypium hirsutum
  Clone ID: LIB3493-018-P1-M1-B11
gaaacaagataaaaaggattttgctttgcctaatttgtaagctttgaggttgactgaaaaaactatggcggaagagggacaagtaatcgcctgccacactgttgattcatggaaccagcagctcgagatgggaaaccagtccaagaaactggtggtggtggatttcacagcatcatggtgcgggccatgccgttttatatcaccaatcctggtggatcttgctaagaagctgcccaacgtcatattcttgaaggtggacgtggatgaactgaatactgtggctcatgagtgggctattgaggcgatgccaacttttgtgtttctgaaagaaggcaccataattgacaaggttgtgggtgcaaggaaagaagaattgcagcagaaaattgccttttattcatctaacccggtgcagacagcatgaatcaacatttaaatgtacctgattgtttggagtagtttattgaacttggatcttttgaatgtctgacagacagaccct

SEQ ID NO: 3535 - DNA, 446 bp, Gossypium hirsutum
  Clone ID: LIB3493-018-P1-M1-B12
gttttgacatttcatgctgtggcatttgctgtgggatattggatctcaaaagttcctgctttcagacaaagagaagaagttagtcggatggtttcattgtgcactggaatgcaaagctccaccatggcaggtctacttgcaacccaatttctcgggagcagtagtcaagcagttccacctgcatgctctgtcgtcgccatggctattatgggtctttctcttgcctctttctggggcaatggtttccgtattagagacctaccatctcaactcatccctcacactggctctgctttccaggctcaatggaataaacacattagacatcttagaggaatggatcaaggtagctttaattttcagagagagagagatggtcatgttttttaactgatcctcacatgaacatgttcctcctcacaataaaacagcagtggcagtcgagc

SEQ ID NO: 3536 - DNA, 410 bp, Gossypium hirsutum
  Clone ID: LIB3493-018-P1-M1-B2
caagatctgtagaaggtactgtcgtcttccgctgatctactacgaatatactacttgagaaaccaaacactcacaaagaaagcatttattttgatctagcaagatgcgaaagcgtgatataaaataaaagtgattattgtattaaagtaaagttggtgggaaatagagagaaagattagaaaaaaaaaatgcacgatgaagatcacatcgacagtagcactgaagtgcaacccagagggatccgatccgataatactagcgaacgctaccgatgagagccatattcgatacttgcaaaggtcaagcgttaaggagatgatcgactacgtttctcgaacatgttctaaacgtacttcttttgtcagcgccagtccgttcagcacgaagagtacagggtacatgcttacaac

SEQ ID NO: 3537 - DNA, 469 bp, Gossypium hirsutum
  unsure (1)..(469): unsure at all n locations; Clone ID: LIB3493-018-P1-M1-B3
gaaaaacttttgcctctgaaactatggctccgttctctttacgtagccgtcttcaggcttctgcgctaagcaagaggcgtctcaaatccaaagccaagcatgggaggaaagggatgaagaacatggcggaaagcttcaaaagattgaaatctgaaatggaagaaataagcgaggaacaaaagaatatcagggaagggcaaaggcaagttaaagaaaaattcggaatcatcgaatccgagtgcgaggaattgaagagggaaactaagctcataatccagcaaagtgcgagaactcaggttaaacttgctcttatgttccgcatactgaaagcaagggaagccgncgagttgaataccgctgccactctcactgaaatgctccgtgaaatagtaggaagagagagggaggaaagcaaagctgacatctgaatgactatgataagccttctcgggcagctgcttcaatgtaa

SEQ ID NO: 3538 - DNA, 412 bp, Gossypium hirsutum
  unsure (1)..(412): unsure at all n locations; Clone ID: LIB3493-018-P1-M1-B4
ngtcggtttatcgctaaaagaagcaattagcgcgagtatatctcgaggtaaactcgtcccaggtgctacaaatgatgtcaattcaacttccatggttccaacatttgcaaatccattttggaaagaaatggtggtactgtcaaatcgatccatcctaaatttaagacggatgccggagttgttcggaattcgtttggcagcagttctagtgacagggttcattttagcgacagtattttggcaacttgataattcaccaaaaggggtgcaagaaagactagggtttttcgcattcgcaatgtcgacaacatattacacttgtgccgatgctcttccagtttttctcccaagaaggtacattttcatgagagaaactgcttacaacgcttacaggagattatcatacgtcata

SEQ ID NO: 3539 - DNA, 451 bp, Gossypium hirsutum
  Clone ID: LIB3493-018-P1-M1-B5
cagccgcaaagactgcctcaacctctcctctgttctttatgccgaaactctcctttttcaactttgatttagacgaagtgaaccaagaggtcgacgtcgtgcctacgttggtaaggatttcctttctcccttttattttttttttgtttggtgtacaaaagaaacaaagaatcaaagaaatcaaaaagaaaagagaaaaaatgacggaaaaaatcaccttaaaaaaaactctttgcttcgattttccgttcgtattcaatatcccaaaaaaagccccctcttagattttacaaatcggctttctatagccgaatctaggattacaaaataatatttctctattttccctattctcgtgtattctgttactggctgatttgttgtgcttgcagttacagctagctggagcaatggacgctggcgcacacgcgcagaggcacatacacgcgtg

SEQ ID NO: 3540 - DNA, 426 bp, Gossypium hirsutum
  Clone ID: LIB3493-018-P1-M1-B6
gatcgtagaaatttggtgttatttgaaagaaagatagttcaattggtaaattaattgaaaaatggagtcgtcgaatcaagcggagttcgattacttgttcaagttgctgatgataggagattcaggagttggaaagagtagtcttcttttaagtttcacttccgattcctttgaggaactctctcccactatcggtgttgattttaaagtgaaatacataaatgccggggataaaaaactgaagcttgcaatttgggatacagctgggcaggaaaggttcagaacattgacaagttcttactacagaggcgcacaaggggtcattatggtttatgatgtaacacggagggagacatttactaacctttctgcgtctggccaaggaattgactctactcaacaaatcagactgataagatgctgtgg

SEQ ID NO: 3541 - DNA, 432 bp, Gossypium hirsutum
  Clone ID: LIB3493-018-P1-M1-B7
acacgacgttcgatgcgaaccgggccggtctagccaatctctaccaggacggttcaatgttgaccttcgagggtcaaaagatccaaggctctcagagcatcgtcgctaagctcaccagccttcctttccagcagtgtcagcacagcatcaccaccgtcgattgtcagccctccggcgctggcggcatgctggttttcgtcagtggtaccctccaactcgccggcgaacagcatgctctcaagttcagccagatgtttcatttgatgccaacaccgcagggaagcttctacgtgttgaatgacatattcaggttgaactatgcataaagatgcaatccaaggatacaaaacaatgttttggctctcagctccctgttcagtttaggcgttcttaaatgtgaaaaccggaaaatctttttatgtttaatcatga

SEQ ID NO: 3542 - DNA, 435 bp, Gossypium hirsutum
  Clone ID: LIB3493-018-P1-M1-B8
gaaattagttgctgaaaattgccagattgtagtccttggcacaggcaaaaaggccatggagaagcagattgagcagctggagatccaataccctgacaacgttagagcagtagccaaattcaatgtcccattggcccatatgattattgctggtgctgattacattttggtccctagtagattcgaaccatgcggtctcattcagctgcatgctatgcgatatggaacagttccgatagttgcctctactggtggacttgttgacacagtcaaggaaggattcacagggttccaaatgggagctttcaatgttgaatgtgatgaagtggatccaagtgatgtgattaaggtggaaaaactgtcaagagagctcttgcaacatatgggactcaagcactgtaagaaatgattcagaattgtatggcacaagatttt

SEQ ID NO: 3543 - DNA, 317 bp, Gossypium hirsutum
  Clone ID: LIB3493-018-P1-M1-B9
tccacctataagaaaggcgtaaatctcccaatctattcaccggcagactcttccgtcttcaaacacttcgaatcgttttccaattactctgacaagatgcaaatctttgttaaaaccctcactggcaagaccatcaccctcgaggtggagagttcagacaccattgataatgtgaaggctaagatccaagataaggaagggatcccaccggatcagcagaggcttatctttgctggcaaacaacttgaggatggccgcacgctagccgactacaacattcaaaaagaattcacccttcacttggttcttcgacttcg

SEQ ID NO: 3544 - DNA, 445 bp, Gossypium hirsutum
  unsure (1)..(445): unsure at all n locations; Clone ID: LIB3493-018-P1-M1-C1
ggcattcagagccgctgtacttcgccacattcggttgcctgttcaaaccctaaagccaactgcttcaagagctccgtcgcaatggagtctcctccggctattctcatcgcacgacgatcaccttactaaagaagaagtaatcgacagagtcctcgacgttgtcaaaagcttccccaaagtcgatccttccaaggtgacacctgatgttcatttccagaaagatttagggttagatagcttggacaatgtggagattgtcatggctttagaggaagagttcaagctggaaattccagataaggaagctgacaaaatcgactcatgcaatcttgctatcgagtacatatacaaccatccaatgggctggtaataacaagcaaaggtgttttcttgtttgaatntcatttggaaagaaggatgatattcctgctctgttcttgttcga

SEQ ID NO: 3545 - DNA, 311 bp, Gossypium hirsutum
  Clone ID: LIB3493-018-P1-M1-C10
atggcgtcctttgatgcgtacggaatggaaggggaagagattcacgctgctcctaataaccatcctttcaccgtcgacgacgagagctactcgaattacggctcttactccaacttcaccgatgaccagcagtttaccggggacgggggcgatgtggcgatagatgacgtcactgcctctgctgatatctttggattcggatcctctgatccgactcatgcctactcgcaatctccattcgctactgcgattccaggtgagaacggaaatggaaccaatggatttggtcttggaaacgatgatgttttcgc

SEQ ID NO: 3546 - DNA, 310 bp, Gossypium hirsutum
  unsure (1)..(310): unsure at all n locations; Clone ID: LIB3493-018-P1-M1-C11
gctaaatccaccactttccagtccctcggctgccaagctcctcaatgcaagcaggtacaaaatcccagctgcgatggcagtggcaacacttgcatattcaacatgacctacgggggttcagccattgcagcaaacctctcacaggacacattcaccttagccaacgactctgtctcgagctacactntcggttgcctgcaaaagacaaccggcaactcggtgccaccacaaggtctattggggctcggccgaggtccattatcccttctatctcagacccaagacctgtaccaatccacattttcatact

SEQ ID NO: 3547 - DNA, 425 bp, Gossypium hirsutum
  Clone ID: LIB3493-018-P1-M1-C12
cggacgcgtgggtttatagataaagttaaggaagctgtcactagatgccaaagaacacagcttctgattgatatgctatccacaggtgaaaatgaagcggggcttgaagttcctgatatgagtatcttcagacctgagattgaagaaaatggatgttcaaatgatcagaagcttgatatggataagatattaagcatattggatgtcaattctcttgtggaagaggcagtttcagctaaagtgctggggaaaaacagtgatttttacggtgttgggttatggatactagtttccttcatcaatcattcatgcaatccaaatgcaagacgtttgcatgtaggggactgtgttattgttcatgcttctaagggatgtaaggctgggggaaagatcactttcatgtattttgatgcactttctccatt

SEQ ID NO: 3548 - DNA, 443 bp, Gossypium hirsutum
  Clone ID: LIB3493-018-P1-M1-C2
aaaactaccaagaccaaaaaaaagaagaaaaaccaccctaagccaacaaaacagcagctctctacaagccaaatatcagccaaacaactttattcgccttctgagaaaaaaatcaagactggtaaaagaacaaaaacgaatgctttgaatccaaaactggagattcagcgaaccttctcctctttcaaagcaaatcaaagggaaccatgatgactctggttccaagccagacaatccttcatcgccatcatctttacagaattaggcattccatcaacccaaaccccaaaaaactatcttctctgtccttccaatgctaaagtgtaagccgctccattaaccattcaaggacaaatagggaataccttccacatagacgccggaacccatcgacccgccaaagaatgcctttgcatccctggtttgcacaaggctaacacatc

SEQ ID NO: 3549 - DNA, 437 bp, Gossypium hirsutum
  unsure (1)..(437): unsure at all n locations; Clone ID: LIB3493-018-P1-M1-C3
ggagaagatggtcatttcaagttgtctgaaaccagtgtgcttaaaatcaacaagggtgatattactaagtggtttattgatggctcctctgatgctattgttaatccagcaaacccgagaatgctcggaggtggtggcgctgatggagccatacatagagctgctggcccagaacttaaagaagcatgctataaggtaccagaagttcaacctggtattcgttgtcccaccggagaagcaaggattaccccaggatttaaactgccagcatctcatgtgattcacactgttggaccgatttatgattccgacaaggaccctaaaggctcactgagaaatgcatacaaaaatngcttaactgtggctaaagagaacaacattaaatacaatcgcatttccttccatatctttgcgggtattacggtacccttatgagg

SEQ ID NO: 3550 - DNA, 221 bp, Gossypium hirsutum
  unsure (1)..(221): unsure at all n locations; Clone ID: LIB3493-018-P1-M1-C4
ggacacggtccatgatgtggccatggatttttatggtaagcgtattgctaccgcttcatcagacagcacaattaagatagttggggtgagcaacaacacacatcagcatttagcgactctgacaggtcaccagggaccagtatggcaggtggcttgggctcatccaaagtttggctctttacttgcttcttgttgntatgatgggcgtgtgattatttgga

SEQ ID NO: 3551 - DNA, 367 bp, Gossypium hirsutum
  Clone ID: LIB3493-018-P1-M1-C5
acgagccgtaccatgagctagaacatatcatcgctgatatgaaagcagagaacggtgctgagaaagcttctcctgcagatgattccgcggatgacaacgagtcatacagcgaatgctaatggaaaagctgaaggtaatgccagatataatggaagctattttagacagtatctgcttcaggccatgtctaaagtcatatggatactaccatgtatactagcgtttcaaatattggtacataatattatgccttatagccgacattaagggctactctaatagactacgctattgactagcgcctaaatctgtaactgaatgttgagaagcatgatgaacacgcttagcatcctgcatcttattcttt

SEQ ID NO: 3552 - DNA, 385 bp, Gossypium hirsutum
  Clone ID: LIB3493-018-P1-M1-C6
gcggcattggtcgacttttgttgtatgattatgataaagtggagttggctaacatgaataggctattctttcgcccagatcaggttggtatgacaaagactgatgctgctgttcagaccctttcagatatcaatcctgatgttgtgcttgagagctatacgctgaatatcacttccgtacaaggatttgaaacctttatgtcaagcttaaagaataaaacatttcgcccaagtaaggaaggtagcggagtggatcttggtttaagttgtgtagacaattacgaagcaaggatggggtcaaccaggcttgcaatgagtgaatcaggcatggatggagtctgtgtatctgagggatgcagttcaggtcataatacagtgctgattcc

SEQ ID NO: 3553 - DNA, 254 bp, Gossypium hirsutum
  unsure (1)..(254): unsure at all n locations; Clone ID: LIB3493-018-P1-M1-C7
attttctcaacatacgattactcgctttcgcttaaaaatggcaatgattcctaccatctttggcaacaacaggcgcagcagcctcttcgacccgttttcgttggacttgtgggatccctccaaggagttcgatttcccaacggtcacatcgtttccttcactttcccgagaaaactccgctttcgtcaacacgcgcgtggactggaaggagacaccggaggcacacgtgttcaaggcggacctnccgggggtga

SEQ ID NO: 3554 - DNA, 263 bp, Gossypium hirsutum
  Clone ID: LIB3493-018-P1-M1-C8
caaacaattgcttgcacttcatctattcttcttacagtttgcattggctctccaaggttcccccatctctttacgatgagcatggcaagtctatcaacagagggaacgtttacatatcggaatcgagccctccaagtgtgtcccgagcgtactggaaccagttccaggtagatttttcattgttcctgaaatcacgatcagaggagcttgtctcatgtgggagatttgttcttactattttggtatgatattgctttatttac

SEQ ID NO: 3555 - DNA, 395 bp, Gossypium hirsutum
  Clone ID: LIB3493-018-P1-M1-C9
ccgctctttctcttcttcttcttcttcttttatataaccaaagtaaggccgattttaaaccggctatttccttttgatggtagtatttcttgtttcatttaatcagattatcaagtgagaaaacgggagaatgaaaagggaagatacagttaggaatgggcatttccccgccgataggagatggtttttccccatcgttatcaccggccttatagctggtgcgattgttacttccagcttcataaaagccgccgattactcgctgctatgctccgtcgccaacaccagatcaccccaaggcgttggtaaagggtcggccacgccgatccaactccaagctatcatccactacgccacatcacgcatcacaccgcaacaaaacttcaaggggatct

SEQ ID NO: 3556 - DNA, 386 bp, Gossypium hirsutum
  unsure (1)..(386): unsure at all n locations; Clone ID: LIB3493-018-P1-M1-D1
tgtaaactgccaaagctaatttattttctttatagaaaaaaaaaatggtggccatatctaagattgcaactggtaatggtcatggtgaagactcaccttatttcgatggatggaaggcatatgagaccaacccttttcatcccattgatagacctgatggtgtcattcagatgggtctagctgagaatcagctttgctttaactttataaaaaagtgggtcatggaacacccagaagcgtctctgtgcagtgcagaaggtgtgaacaaattcaaggagaccggtctgttccaagactatcatgggatgcctgagttcagaagaggtgttgcaaaatttatnggggaaagtgagaggggtgtcagtgaatttgcccagaccgcattg

SEQ ID NO: 3557 - DNA, 398 bp, Gossypium hirsutum
  Clone ID: LIB3493-018-P1-M1-D10
ggaacattgacgttgacttggattctgatggtctgcctctcccaagtagcggtgcagagccaatactactcggagagcttaccatatgatcccaggccggttaaggtcactaatctttacttctttttgcatgaaactctccgcggtaagaacccaacagtagtcatggtagcccaagctaacaacacaagcaacgacaactactcatcagtgccatttggcaccctatatgccattgatgatcccctcaagataggtcctggggacaactcagaggtgattgggaatgctctgggacttgggatcttgtccggcaaaaattcaacgaccgtggggatgtacttagattttggatttactgccggaaagtttaagggcagctctattagcatattttc

SEQ ID NO: 3558 - DNA, 255 bp, Gossypium hirsutum
  Clone ID: LIB3493-018-P1-M1-D11
gggtacagaccctctgaagagggagatgggaagcagtatgaaaggcgcggcggctatgatgggcctcgaggttctttccgagggggtcgccgtggtggttttaacaatggagattctggagaaggggaacgccctcgcaggcagtatgatcgccacagtggggctggacgtgggaatgaattcaagcgtgatggttctggacgtggaaattggggtagttctactgatgagattgcaccggagactgaagaaaat

SEQ ID NO: 3559 - DNA, 289 bp, Gossypium hirsutum
  Clone ID: LIB3493-018-P1-M1-D12
attacaccgaactgttgaaccggaagttgttggattgggtcaattcgacgggtcgggtttatatgactcatacgaaagttggtggaatatatatcctgagatttgctgtgggcgccacattgacgggtgacaaccacgtggttgctgcatggaagctgatcaaggaaggagctgatgcattgctgaagactgtttgactgcctcacttccaccgtagctagtgtggacgtgctttagtatttggaaatgtcattaataaggctgaatatgccataacttgcaagcattt

SEQ ID NO: 3560 - DNA, 417 bp, Gossypium hirsutum
  unsure (1)..(417): unsure at all n locations; Clone ID: LIB3493-018-P1-M1-D2
cttcgtgaaaaccttgaccggcaagacaatcactctcgaggtcgagagctccgacacgatcgacaacgttaaggcgaagatccaagacaaggaaggcatccccccagaccagcaacgtctcatcttcgccggaaaacaactcgaagacggccgtaccttggccgactacaacatccagaaggagtcaacgctccaccttgtccttcgtttgcgtggcgggatgcaaatcttcgttaagacgcttacgggaaagacgatcanctctgaggtcgagagctctgacacgatcgacaacgtgaaagccaaaatccaagacaaggaaggcatcccgccagaccagcaacgtctcatcttcgccggaaagcaactcgaggacgggcggactttagccgattacaatatccagaaggaatcgac

SEQ ID NO: 3561 - DNA, 395 bp, Gossypium hirsutum
  Clone ID: LIB3493-018-P1-M1-D3
ctcggatcataccaatcaatcaaaatccccaaaaaaatattaaaaaaaatgagctctcagattttcagatctgcttctagagccgccaggtctctcctttcagcatccaaggcttctcgcttttactctgaagggcgagctgtagctgccgctgcagcagtttcacttggcggtaaagtgcctcttttggcttcagcttatggaagtactgcttctgccaatgcatctagagcatggctttcaggagtttttgctcttccagtggcagcttacatgcttcaggagcaggaggttcatgctgcagagatggagcgcaccttcattgctatcaagcctgatggagtgcaaagagggctgatttcagagatcatctttcgtttgagcgcaaagggttc

SEQ ID NO: 3562 - DNA, 447 bp, Gossypium hirsutum
  Clone ID: LIB3493-018-P1-M1-D4
cggacgcgtgggcggacgcgtggggaattgttgaaagagaaaacaaaaatggaggtagctttccctgttattgacttgtccaaaatcaatggtgaggagagaggagccaccatggacatgatcaaagatgcttgtgagaattggggtttctttgagctgacgaaccatggaatatctcatgaactgatggacactgtggagaaactgacaaaggagcattacaaaaagtgcatggaggataggttcaaagaaatggtgacaagtaaaggtccttgaagtgttcaatctgagatcactgacatggattgggaaagcactttcttcttgcgccacttgcctgaatcaaacctttatgaaatcctgatcttgatatgataccaggaggtgataagcaatttgcagtgagttgagagctgctgagaactttgacatctggtggaatttggt

SEQ ID NO: 3563 - DNA, 405 bp, Gossypium hirsutum
  Clone ID: LIB3493-018-P1-M1-D5
cacggctatggatccgacactggttggctcttccagaagatctgcatcaacttttccaattggggttatgctgttttcgccgctgatcttctcggccatggcagatccgagggtctccgctgctacttaggtgacatggagaaagttgctgcaacatccttatcattcttcaagcacgtccggaacagcgatgaatacaaaaacttacccgcattcctgtttggtgaatccatgggaggagcagcaacaatgctcatgtactttcaatccgaccctgaaacttggacgggtctaattttctcggcgccgctctttgtgatgcctgagaacatgaagccgagtaagggtgcggtgttcgtgtacggtctgctcttcggattagctgatacatgggcaactatgccg

SEQ ID NO: 3564 - DNA, 429 bp, Gossypium hirsutum
  unsure (1)..(429): unsure at all n locations; Clone ID: LIB3493-018-P1-M1-D6
gttttcagtatgtttatcggcgtcctatggtaagaggaccggaatctccaccatggctgacggagccgatgggtttcaaccaagcaacggttttccgcatgaagctgatcctgattcttcaacctctatcgatcctgatcctaccggattcggtgctgggataggtataggttatgaaagaagcccttactgtatcgactgcgacgatgtggatatcatgggcggcagcttttgcggcgcctgcaattacggatgcccttaccgcaggttcaataatgggtggtggtggggattgcttataatgatgaactcaaacgaacgattaaggaccttaccatgaaactngatgccaatggtcttttagggaaaaagaaggccatgaatatacaagctatggcgccagaatcttcatagaaatcttcatagatt

SEQ ID NO: 3565 - DNA, 342 bp, Gossypium hirsutum
  Clone ID: LIB3493-018-P1-M1-D7
catgaatcaggacaactattttgaggaagccttgaaggtgagaaaccttttggaagaatttgaccgtgatcatggcatacgtcctcctactattcttggtgtcagggaacatgtatttacgggaagtgtctcttctttagcttcttttatgtccaaccaagaaagcagctttgtaactcttggtcagcgtgttttagcaactcctttgaaggtccggatgcattatggccatccagatgttttcgatagggttttccatataataaggggtggtttcagcatggcatcttgtttttttatactaatcttagtaatattttccgtttttcatattacttttct

SEQ ID NO: 3566 - DNA, 360 bp, Gossypium hirsutum
  unsure (1)..(360): unsure at all n locations; Clone ID: LIB3493-018-P1-M1-D8
gagaaaagatacactgatgacatggagcttgatgatgctgtgcatactgctattttgactctcaaagagggacttgaaggacaaatctcagggaaaaacattgaaattgggattattggaactgacaaaaaattcaggctgtaaagctactgctaaggttggatgctgagaatccggattcacatcgctgcttgaaagtcgaagttttggaagttcaggtcaggtagaaggtattgttgctctcacagctcgtcgaagtgggctgcatcctggtactcggtatttggctaggggcattaattcctgttttagcacaggtggtggcagncgatgcaaatcttgtcttaaccactaagggca

SEQ ID NO: 3567 - DNA, 466 bp, Gossypium hirsutum
  Clone ID: LIB3493-018-P1-M1-D9
gggaataaattcataggccaccatgactcgctcgttcaactttatacccatgctcctattgcttactttatcagccctgactgtccaagaaatttcagctgcaccttcctgcactgaagttgccatagaattactcccatgcctcagcttcctgtctggcaacggtgctgcagatgttccatcgcgggcatgttgtttgggtgctcaaactattgcttacgaagcacagaccaaagatgaccgacgggctatctgcgagtgccttgttaatgcattagcaaatattggcacatctgactccttcactgcgcggatacctttaattgctacccaatggcggggttgaagctctctttcgccaattaccggcgacaaagattattgttccaagctcttgccttgacttcggttgatataccaatctgttgtgccacacctaaggaagatattaattatatttagctca

SEQ ID NO: 3568 - DNA, 350 bp, Gossypium hirsutum
  Clone ID: LIB3493-018-P1-M1-E1
ccttcttctactccttcaacgaaaaacaccgagaaaactactcaatcccaacaatggaatcctttgcaaagagcggcggctatggctttagatgcggtggagaatgctttagtttctcatgagcgtcaacatcctttgccgaaaacagctgaccctggtgtacaaatctccggtaactttgctccggtccctgaacaacctgttaaacaaaggcttcccgttattggaacaatcccggattgcatacaaggagtctatgctcgaaacggagccaacccgcttcatgaaccggtggctggacaccatttcttcgatggggattggatggtcatgccggtcattcaaaaatg

SEQ ID NO: 3569 - DNA, 385 bp, Gossypium hirsutum
  Clone ID: LIB3493-018-P1-M1-E10
gcaaagaactgtcatttggatgggaaagaagcaggagactgttgaagatgtaccttgtggtaacacagttgccatggttggtttggatcagtttatcaccaagaatgctactttgacaaacgagaaggaagttgatgcccacccaattcgtgcaatgaagttttccgtctcccctgttgtccgtgttgctgttcagtgcaaggttgcatctgatcttcccaaacttgttgaagggcttaagcgtttggccaagtctgatcctatggttctctgtaccattgaagagtctggagagcacattgttgctggtgctggtgaactccaccttgagatctgtctcaaggatttacaagaagatttcatgggtggtgctgagattattaaa

SEQ ID NO: 3570 - DNA, 447 bp, Gossypium hirsutum
  Clone ID: LIB3493-018-P1-M1-E12
ccggggaacacttttaataccgtgtcgaacagcaatgagaggtagctttcccctaaatggcacatatttccaagttaatgaggtatttgccgaccatgattctagtctgaacccgattgccgttccaagggaatggctatggaacctgccaaggagaatggtctactttgggacatccataccttcaatatttaaaggcttaacaacagagggaattcaacactgcttctggagaggatatgtttgtgtgcggggatttgaccagaaatctcgagcaccccgtcctctaatggctagattacatttcccagtcagcagattggccaaagcaaaaggcaagggtgctggagaagacgagtaaatgatagcagagtcataagatccaaacaagtcaacattgaccaaataaccatgtatgaagaaatggaattgcattttacaccactg

SEQ ID NO: 3571 - DNA, 468 bp, Gossypium hirsutum
  Clone ID: LIB3493-018-P1-M1-E2
ctgatttagagcatatagatatggttgtactctcaatagggcattggtttcttcatccagcagtgtattatgagggtgtgtcggtttaggttgccattactgccctggactaaatcacactgagattggattttatgatgtgatgaggaaggccataaagaccgcacttaaggcaataattgaaaggaagtcgactgatggtaatggaattgatgtgtttttaacctctttttcaccttcacattttgaaggtgaatgggataaggctggtgcttgtcccaagacgaagccttacgaggaaggagaaaagatggttgaaggaatggatgcagatatgagatcaatcgccaatgaagaaatggaagctgctaaggtaaatgctaagaattcaaaggattgagactagagacctttgatgtgacccaaatatcattaatgagaccagatggtcatcccgggccttacatg

SEQ ID NO: 3572 - DNA, 452 bp, Gossypium hirsutum
  Clone ID: LIB3493-018-P1-M1-E3
ataaaaacagtttcatttccattctaagttttgtgtttttgatttgccttttgtgggtttttttttataaaaaagttgagcaaaaatgtttattgagaattttaaggtggagagccccaatgtgaagtacacagagaatgaaattcagtctgtttacaactatgaaactacagagcttgttcatgagaacaaaaatggaacctatcaatgggttgttaaacccaaaactgtcaaatatgaattcaagactgatatccatgtccctaaattgggggtgatgcttgtgggaatgggagaaacaatggttcaaccctcacccggtgtgttatagctaacaaagagggtatctcttgggctactaaggacaaggtacaacaggctaattaacttggttcattgactcaagcatcaacgatccgaaatgggtcttacaatgggagaagagattatgc

SEQ ID NO: 3573 - DNA, 371 bp, Gossypium hirsutum
  Clone ID: LIB3493-018-P1-M1-E4
tcttcctgtttattcgaatccgttgcaagacaatcctgcatactcagttgttaagcaatattttgtccatgtagatgacaccgttcctcaaaagattgttgttcacaagaatagtccaagaggagtacatttccgacgggctggaccacgtcaaaagatatttttcgactctgatgacgttcatgcctgtattgtaacgtgtggtggtctttgccctggactcaacaccgtgattagagagatagtatgcggcttgttccacatgtatggtgtgaggaaagtttcggggatagatggaggatacccgggcttttatgctaaaaatactgtgcatttagatcccaaggttgtcaatgatatccataaacgtg

SEQ ID NO: 3574 - DNA, 470 bp, Gossypium hirsutum
  Clone ID: LIB3493-018-P1-M1-E5
cgctcattatttttactcttattcgattaaattccagaactcgaagcgaagagacaaagatcgccatggcacctcctgcaaaagcaataactagtcccgtgcctgatgcgtggtatccaaccctagccgtcttcatgctcgccattggtcttgtcctcactgcttccttcttcatctacgaagcaacttcttccaaaccaaatcgcaggcttgcaaaggagctcacaactgggggagtggcatctgtcttcctgggattcgggtcactgtttttgctactatcagcccggcgtttatgtctgattttcatatattttttcaaccattttaaaaatttgctgagcaagaatgggttgaattggaggatcatggttcgaccttgttacctaatagactttttcttttttgtattaatcaaataaagagtgcttctatgagaatatttgatatcttttttggttttctgggca

SEQ ID NO: 3575 - DNA, 430 bp, Gossypium hirsutum
  Clone ID: LIB3493-018-P1-M1-E6
gatatgctcgaagttactcccgcagtccatactattattctcctcctcctaggcaaagacgttactcaaggtcaatttcacctggagataagagatatagggaacggtcttactcgaggtcaccctgtggctcaaggagtccaagccggagctttagtaggagcaggagtcaaagtttggactattctaggtgactgatttgaaggtggctgggttagtatgtatccgggagtatttctccacgttaattgtctagatgatttaagtttaggtttgtatcagcagtatatgagtgacttcaaagttgattgtttagtttctagtgctgattatggctagtaataaagttaaaacataagcatgctgtttgaatattctatgctgacaatgctcgccatccttaaaatgatctttattgagatttttcatt

SEQ ID NO: 3576 - DNA, 408 bp, Gossypium hirsutum
  Clone ID: LIB3493-018-P1-M1-E7
ggattttggggttatcttatgcaaattatatatcagacatgtggaggtgctgtcatcttgacagacattgtattctggcttgttattgttccatttttatcaaactcacaccttggcctgaacatgttaatgggttgcatgcacactgtgaatgctgtgcttctcatactggatactcttttcaatagccttccatttccttggttcaggcttgcatattttgttcagtggagctgtctatatgctattttccaatgggttcttcatgcctgtgggtttacatggtggccatatcctttcttagagcttaataccccatgggctcctttatggtacttctccaatggctgtggtacacatcccttgctatggaatatatgcactgattgtaaaagcaaaaaattcaat

SEQ ID NO: 3577 - DNA, 469 bp, Gossypium hirsutum
  Clone ID: LIB3493-018-P1-M1-E8
ttatgcagcatctgacatgttcataattccatctattttcgagccttgtggccttacacagatgatagcaatgagatatggttctgttccaattgtaagaaaaactggtggtctaaatgacagcgttttcgatgttgatgacgacacaataccttaccaatatcgaaacggttttacatttgcaactcctgatgaacagggactaaatggtgcattggatcgtgcatttaatctctacaataacgacagcgagacttggcaacaacttgtccaaaagaacatgaacatagatttcagctggcgttcttcagcatcacaatacgaggagctgtacgcgaaatccgttgccagagcaagggcagccacaagtcgcacgtaagggtcagtcccaaactctttctttttgttcgagcaaagccgaatatccataaatcccgattacaagtgagttcatccatatatatatttt

SEQ ID NO: 3578 - DNA, 399 bp, Gossypium hirsutum
  unsure (1)..(399): unsure at all n locations; Clone ID: LIB3493-018-P1-M1-F1
ctttgctctgaaaagtccaagtttttctccaatggcgaccgtctctccaactcctctgttgaaagatgagctcgacatcgtgattcccacgattaggaacttggactttttggagatgtggagaccctttttccagccttaccatctcatcattgttcaagatggtgatcctaccaagactatcaaggtccctgaaggcttcgattatgagctttacaataggaacgacatcaacaggatnttgggtcctaaggcttcttgtatctctttcaaggattctgcttgtaggtgctttgggtacatggtttccaagaagaaatacatctatnaccatgatgatgactggcttgtgcttaagatccatctggcaaagacatcaatgcattggagcagcacata

SEQ ID NO: 3579 - DNA, 370 bp, Gossypium hirsutum
  Clone ID: LIB3493-018-P1-M1-F10
cggacgcgtggggagactaaattccatgttcttgctgttgatgataccctgattgatagaaagctcattgaaaagcttctcaagacttcttcttatcaagttactgcagtggattctggaaccaaggcattggagtttcttggattgaacaacaatgatcatcaagatgttgaagtgaacctgatcatcacagattactgtatgccagggatgacaggctatgatctcttacgaaaaatcaaagaatcttcatcattcaaagacataccagttgtcatcatgtcttcggacaatatcccatcaagaatcaacagatgccttgaaggtggagcttgagagttctttttgaagccagttcaattatcagatg

SEQ ID NO: 3580 - DNA, 315 bp, Gossypium hirsutum
  Clone ID: LIB3493-018-P1-M1-F11
gtttaaatggaactattcatcacgaatacgactaggttcatatcctcgacaggatgggttaagtctagttatgggattgtgacaaccaaatccattcaagatttaagttatagtaactccatggtgataaatgggaatctgcagatcataaaccagacaatccattttaatgacagtgtttatgcagacatcccggctcctaatgctgaatcgaagaaatcactcaagaggtttcttttctacttatactcttacgatatcgatcatggaaacagaattactttctttgtttctaatgctactctggaatttgat

SEQ ID NO: 3581 - DNA, 463 bp, Gossypium hirsutum
  Clone ID: LIB3493-018-P1-M1-F12
cgaagttatccggtgcacgttagcatcaccaccaaccaaaagcaacgaccagcgccaccaccactgccgtcgcagctaccatcatggctactcactctcgacctccgccaccaagaccacttgacctcgacttgacgatcgtgtcagccaagcatctaaagaacgtcaactggcaaaacggcgatctaaaaccctacgcagtcttctgggttgatccagaccgacgtttatcaacccggtcggacgattctggctcaactagaccggtctggaatgagcgtttcacccttccccttgttgttcctccacacgaaaccgttttgaccctcgagatctttcattccaaaccctctgaaactccgaagcctttggtggctactctccgggttgagctcaaggaattacccgacccggatgatggttccaagatccgaaccttttctttgcttcgacccctgggtcg

SEQ ID NO: 3582 - DNA, 370 bp, Gossypium hirsutum
  Clone ID: LIB3493-018-P1-M1-F2
gccgcacgttggctgattacaacatccagaaggagtccacactccacttagtgcttcgcctccgtggaggaatgcaaatttttgttaagactttgactgggaagaccattacattggaggtagagagttcagataccattgataatgttaaggcaaaaattcaggacaaggagggaattcccccagaccaacagaggctgatttttgctggtaagcaactggaggatggccgtaccctggctgactataacatccagaaggagtccaccctccacttggtgctccgtcttcgtggtggtatgcagatttttgtgaagacacttactgggaagaccatcacccctgaagttgagagctctgacacaatcga

SEQ ID NO: 3583 - DNA, 392 bp, Gossypium hirsutum
  Clone ID: LIB3493-018-P1-M1-F3
atttcctgtggggaaaatacgagcccgaggtgctcgttagcatcaattcaaccttcccttacctcaacttcagactttaccacttcgactccgaccgtgttcgtggcaagatatcaaggtctattcgccaagcattggaccagcctttgaactacgccaggatttaccttgccgacatgctaccaccagacgttaaacgtgttttatacttggattccgaccttgtcgtggtggacgatatcgtgaaacttctggaagttgatttggaaggcaaagtgttggcggcaccagaatattgccatgccaatttcaccaagtatttcacggacttgttttggtcggaccaaggagttgtctagtacaattaatggaagaaagccatgttatttcaa

SEQ ID NO: 3584 - DNA, 485 bp, Gossypium hirsutum
  Clone ID: LIB3493-018-P1-M1-F4
ataaatggtaccaccctccactatgataacaaagatgaagaggttttcatatgttgccttaagtgcggtactgtcactcatggtggtggcggccccagcgttttcgggtgaaacacggtgggcagaggcggcagtgacatgtaaccccatagagctcagcccatgcttggcggcggtcatgtcgtccacgcctccatctgaaacctgttgcagcaggctgagggagcagacgccatgcttttgtgggtaccttaacgacccatctttaagacaatttgctgataaccccattattagaactgttgggaacgcttgtggagtgcatatcctcagtgctaaaacctcttcattacaatactatacatacatgcatacatacgtatacatacatagggcagcatataaggctgattctgctgtcaactatattactgtctgaataaatgaataatgatgatgggatgtgggtaatattttattgttat

SEQ ID NO: 3585 - DNA, 419 bp, Gossypium hirsutum
  Clone ID: LIB3493-018-P1-M1-F5
cggacgcgtggggcaaaagcccttggacaaatcaaaccttctggagtagaggttcattttattgttgcatcttgtgaaaacatgataagtggaaagggtatgaggcctggagatattgtcacagcttcaaatggaaagacaattgaggttaataacactgatgcagaaggtaggcttacactagcagatgctttggtttatgcttgcaaccaaggtgttgagaagatagttgacctggcaacactaaccggggcttgtgttgttgctcttggaccctcaattgcaggcgtcttcacacccaatgatgatctagcaaaggagttatttcaagcttcagaggctagtggtgagaaactttggaggatgccattagaggaaagctattgggaatcaatgaaatcaggagttgctgatatggt

SEQ ID NO: 3586 - DNA, 356 bp, Gossypium hirsutum
  unsure (1)..(356): unsure at all n locations; Clone ID: LIB3493-018-P1-M1-F6
gctgttggtgcagactcttgtccccagctcattgcttgtaaagcagaagcctttctgaagctccaccaaattgatgactcggattcctgcttatcgaacatttcgaacttggagaaatatactgcctcttcacagattaggtactttggctttgtggctgaagcttatgccctttttgttcaagctcaagttgagatggcattgggaagatttgagaatgcagtttctgcagcagagaaggctagacgtattgattacaacaatgttgaaaattgcagcggtatttaaataatgtgaaaatggtagcaagagcacggtcacanaggcaatgactttttcaatgccggaagatatgc

SEQ ID NO: 3587 - DNA, 203 bp, Gossypium hirsutum
  Clone ID: LIB3493-018-P1-M1-F7
gcaccccggtagaaagcttgaagctgacatcttggagggcgatcttggttgaaaatcacactgtttttggatcgattactcaaggggtactatgagagagcggatctgccatttaaagtgtaattgatcaatacccgaccgttgtcatcaacttgaccgaactgcaataagagagccagcatctggataacagtggcttacaa

SEQ ID NO: 3588 - DNA, 418 bp, Gossypium hirsutum
  Clone ID: LIB3493-018-P1-M1-F8
cggacgcgtgggcaaggaactacatggcaaatcaagttcaaactagattgtactgcaaatgaaacggaaacatacaaactacgattggcgttggctactgcacatgctgctgaacttcaggtaagggtcaatgatgatggaaagtctcctctattttcaagtggacaaattggtaaagacaacacaatagccagacatggtatccatgggctttaccggctttaccatgtcggtattccggggaatctgcttcttgaaggagataacaccatatttctaactcaaccgaaaagcaccagccctttccaaggaattatgtatgactatattcgattagaaggccctgcatcttctaatggaaacaagaaagcttaaattttttccagatattcacaaaattgaagctagaaacaggttt

SEQ ID NO: 3589 - DNA, 371 bp, Gossypium hirsutum
  Clone ID: LIB3493-018-P1-M1-F9
cgtgaatgtataaaaccctagtttggctcccacggttattctcctcagataagtagtcccccagagtctcttccctcatctacccccaaatctcctcacattatgtctttggtggccaacgaagattttcagcacattttacgtgtgctgaacaccaacgttgatgggaagcagaagattatgtttgcattgacctccatcaagggtatcggaaggcgattcgctaacatcgtttgcaagaaggctgatgtcgacatgaacaagagggctggtgaattgactgcacaggagttggacaatctcatgaccattgttgcaaacccccagcagtttaaaatccctgactggtttttaaataggcagaaggatta

SEQ ID NO: 3590 - DNA, 359 bp, Gossypium hirsutum
  Clone ID: LIB3493-018-P1-M1-G1
ctacagtgatgctcttattggtggaggtttctctttcaggaaccccaatgctacccagacatgcggttgtggtaaatcgtttacggcagaaatgtgaaatcatatgtacaaagacagtccatccgtttcatgtaatgcaacatacaaattatgcctgtaaatctttcatgtttaactgacttcatatttctagcacctttcataccttcttttctcttttagaaggaatatatatttgttcgaaggccagacactgatattggtcttcttcatgcttacggattttggcctctctatccaaaatgttgctcgacaaactcgagtgaagggtcgatggattatttttacttgaggaatac

SEQ ID NO: 3591 - DNA, 290 bp, Gossypium hirsutum
  Clone ID: LIB3493-018-P1-M1-G10
ctgtcacgtgactgaacccgatgcaaaaaaaaccttataatcatcaaatcgagatgagattggcgtgcctgtacagtgtaactggcagcgactctaacatataaactgccgacacatggactgctgacaacattgttgtgaacaaatgtaacgtgaacactatcatgattaccgatgctgaagggtcattcgccgccagcggtgaatccggggacagagtgcagttcacggagtatatacagaaaaacgtggccttgtatcagtttcgaaacggtattcctttgacgact

SEQ ID NO: 3592 - DNA, 249 bp, Gossypium hirsutum
  Clone ID: LIB3493-018-P1-M1-G11
ccacccacttcttgcagtgctggtccagtagctgaagacatgtggcattttcaagcaacaatcatgggaccctcatatagcccttattcttgaggtgttttattagtttcattccttgtttgttcaattttttcttgtatgtctatctaaatttatttattttttcttattatctttttttatattttttaatatttttcttttattattatttttattttagtattgtatatatatattttatatttt

SEQ ID NO: 3593 - DNA, 394 bp, Gossypium hirsutum
  Clone ID: LIB3493-018-P1-M1-G12
agatcagtgatgctggcttggttgcaattgcagagaactgtcagttgctcagtgatctcgatgtctccaagtgcacaataaccgactctggaattgcagctcttgctcgttctaatctgatcaatctgcagatcctatctgtgtctggttgcaatctggtctccgacaaaagcctgccatcacttggaaaattgggtcagaccctcttggggttaaatctacagcagtgcaaggcaatcagcagtggtgcagttgacctgctagtggagcagctatggaggtgtgatatccttttctaaacgatgttgcagtatgggattgtcaacaacttcggttttgacccttcgagaagcttcagaatagcctttgtagtattagcagttgtggagttttg

SEQ ID NO: 3594 - DNA, 411 bp, Gossypium hirsutum
  Clone ID: LIB3493-018-P1-M1-G2
accaaatctgagggtaaattggttacctctaagagttatagctcttgcaaggtatggtttgtgggagatgacttgaccgaagaagagcaaaggaaggcaaataaaggaacactgtttattcccttctcgcaacttccaccaaaaaaattgcgcaaggactgcttctatcacacaacaccagcgatgcagactccgacggcccttgagaatgtggattcttgcgagaactggttgccaaggagagtgatgagtgtatggcgcatagctgggatactgcatgctctggaaggatgggaagagcacgaatgtggttacaccatgtctaacattgacaaagtttgggaagcatgtctcaagccatggatttcaagcctctgaaggtcccaactcaaatcaaagtccctagaagat

SEQ ID NO: 3595 - DNA, 381 bp, Gossypium hirsutum
  Clone ID: LIB3493-018-P1-M1-G3
ttcttccttgattttcttgctgtgcttccattaccacagattgttgtttggcgatttcttcatggttccaatggttcagatgtgctagcaacaaaacaggccttgtttttcatcgtcttgtttcagtatatccctcgatttcttagagttatacccttaacatcagaaatgaaaaggacaacaggtgtctttgctgaaactgcttgggctggagctgcatattatttgttattatatatgctttgtagtcatatagtaggggcattctggtactgggtagccgtagaacgaaatgatacttgctggcagaaggcttgtaaggatattggtagggataaatgcaatacaaatttcttatactgcgggaatcagcattttgga

SEQ ID NO: 3596 - DNA, 405 bp, Gossypium hirsutum
  Clone ID: LIB3493-018-P1-M1-G4
gttttattggtgatgttcatgacttgaactgtggttgatgtttagaactctaatattccctatgttgtaaaattttaatgctgtgatttccaaacaccattctggccttgacagatgcaaatcagattgttgattcaagttatgacttctccgtggtggattccaactctttgctgtttctttttaaatatgcacccgaattggcaaaggagttgaacattggtcctgagttttctttcgaaaccgctaaaatgtctaaccaacggacttttttgacactttttccggtcaactttttgttctcaagaagtatgcagttccctgcaagaagtgatgagattttgaagcaatacagacagtttcctcatttgtatactaataagccacaaacaatgtccagtgatg

SEQ ID NO: 3597 - DNA, 353 bp, Gossypium hirsutum
  unsure (1)..(353): unsure at all n locations; Clone ID: LIB3493-018-P1-M1-G5
cacaaatagtgagcacaagaccgagttgaaagagaaattcaagcgcatgtgtgaaaaatcgatgatcaagaagcgatacatgtaccttacagaagagattttgaaagagaatcccaatgtatgtgaatacatggctccttcactggatgctaggcaagatatggtggtagttgaggtgccaaagctaggcaaagaagcagccaccaaggccattaaggaatggggccagcccaagtccaagatcacccaccttgtcttttgcaccactagtggtgtggacatgcctggggctgactaccagctcaccaagcttttgggccttccgnccgtccgttaagcgcctcatgatgtac

SEQ ID NO: 3598 - DNA, 265 bp, Gossypium hirsutum
  unsure (1)..(265): unsure at all n locations; Clone ID: LIB3493-018-P1-M1-G6
tccttctggttttgattggttaaagactgttgatgactttgatgaatttatgaactggatatgngtaccgtggtggtgtctttgcaaaggctgaacagagctgggagcgatggtggtacgaggagcaagatcatctaagaacaactggcctttggggaaagatactagagatagttctagatcttcggtttttcttttccagtatggaatggtatatcaaactgggaattactactaatagtaccagtatttatgtatacttgct

SEQ ID NO: 3599 - DNA, 312 bp, Gossypium hirsutum
  Clone ID: LIB3493-018-P1-M1-G7
ctctaaacacctgaatataatcttttgcttacggtttttcttgcgtgcttttgctttggggttttgagttattcatcaatggcggacacagagacgtttgcttttcaagctgagattaaccagcttcttagtttaattatcaacactttctacagcaacaaggagatctttcttcgtgagatcatcagcaacgcttctgatgcattggacaagattagattcgagagtttgacggacaagagcaaacttgatgctcaaccccagctgtttatccacattgtccccgataagacaaacaatactctatcgatc

SEQ ID NO: 3600 - DNA, 145 bp, Gossypium hirsutum
  Clone ID: LIB3493-018-P1-M1-G8
tctgtattccttaaataccactcgcatccttagtttggaccaacctacgtctcctaatccgacggtcgagatggctctatcacacctcgccgcttctgcttctcgctcatccagtcttcttaaacccctcttgtcggctctttcc

SEQ ID NO: 3601 - DNA, 361 bp, Gossypium hirsutum
  Clone ID: LIB3493-018-P1-M1-G9
aagcaaatgaccgattccaactcagtccctctcttaccgtaactcagctctcagatattctctttttctttttatttaatgtttatgctacgatgttttcaagttgcccattttctctatcgtctctgcttataaacaacgtcgtgctttacttggggcaatttttttaacctagtcaatttttttcaatttagggtatttttcttcgtttagcttcaaatcaagtggagatctggtttggttagtaacgcaaacaaggaggtatggataaagcaaaactctctgaatggggcgagaaactgagaacgggtggagctcaaatgggtagaatggttagtgggaaaatgaaggaaatttttta

SEQ ID NO: 3602 - DNA, 390 bp, Gossypium hirsutum
  Clone ID: LIB3493-018-P1-M1-H1
ctcatgcaacattttcatgtgatagccaactggtatatgccagctttttggatgcaactatttgtgtgtttgttgctgcaaacctcagaccacgttgccgtataaatccctctgcttatctgccagctagtgtcagctccaatgttcaccctcttgtaattgctgctcatccatcagagccaaatgaatttgcggtgggactctccgatggaggggttcatgtcttcgagccccttgagtctgaaaacagatggggagtgcctcaaccagcagacaatgggtcagccagcagtataacagcgacaccttcagttgcagctcaaggatcagaacaagcgcaaagatgatgatgaaaaacgggtgatggagcccaagtttcttttatatact

SEQ ID NO: 3603 - DNA, 298 bp, Gossypium hirsutum
  Clone ID: LIB3493-018-P1-M1-H10
gcggcggggactgcaataggatttgttggccgttatggtaacagtcatgctggttggtcggaaatctgcgaccgtttgaagaaatactgcgacaaggtgaccacttctatggtgctgtcgtatctgtcagtgatttgtttagtggtgcttacagtcatctccgccggcaagtcccgacaaatcatggtttaaaagttatttgaatttgggtcatgatgacgatgcaatgcgtgtctttgtaaactttgttcactctttcgtagcaaaaacgaaagtaataaaatttagcctttttttt

SEQ ID NO: 3604 - DNA, 467 bp, Gossypium hirsutum
  Clone ID: LIB3493-018-P1-M1-H12
ggcattgcttgggcttttggtgggatgatctttatccttgtttactgcactgctggtatctctggaggacacatcaacccagcagtgacctttgggcttttcttggctaggaaggtgtccttagttcgagccatattttatatggctgctcaatgtttgggagccatatgtggatgtgggctagtgaaggcattccaaaagtcatattacaacaagtatggaggaggagccaacagcctcgctgatggatacagcactggaactggtttggcagctgaaatcattggtacctttgttcttgtctacactgttttctctgcaactgatcccaagaggaatgcaagagattctcatatccctgtcttggcaccacttcctattggatttgctgtgttcatggttcacttggcaactattccaatcaccggccaccggtatcaacccttgctcgagtcttgggggccgtg

SEQ ID NO: 3605 - DNA, 394 bp, Gossypium hirsutum
  Clone ID: LIB3493-018-P1-M1-H2
gtcactgttgaaattgtatggtcatacttgcatatatcgatctcccctgttttcttctctgtaaattttataacttggaacctagacacccatggctactgtttctcaattgaataactttccatgcaagaccttcttaataaccccacaaaacagtaactttacctcaaaacttccggttctgcctctaaactctacaaaaccaactcagaattcgatcaagaaatctcaatttttgacccagaaatcagtccagccaaggcctgttttccaggtccgtgcttcggacgccgacgacgaatggggcccggacaaggaggagccagttgtaatcgagagtcctggagtggccgtggcggaagagaagaagcctgacgatgcgggggaaatagag

SEQ ID NO: 3606 - DNA, 461 bp, Gossypium hirsutum
  unsure (1)..(461): unsure at all n locations; Clone ID: LIB3493-018-P1-M1-H3
agacatgattgctccaggggttaacattttagcagggtggtccggtgcagtaggtccaacggggctggctacggataccagacgagtggattttaacatcatttcaggaacttcaatgtcttgcccacatgttagtggccttgcagggttgctgaaggcggctcacccagattggagtccagcagctattagatcagctcttatgactacagcttatacggaatacaaaaacaagcagaaaatgcaagatgttgcaacggggaaaccatccaccccgttcgaccatggtgctggacatgtggatcccgtttcagcgcttaatccagggcttgtgtatgatttgacagcggaagattattctggtttcctttgtgccttgaactacacagagtntccaaatagatccctggcgagaagaaacttcctatgtgatgctagcaagagatacagagtcactgatc

SEQ ID NO: 3607 - DNA, 381 bp, Gossypium hirsutum
  Clone ID: LIB3493-018-P1-M1-H4
agaaagctgtatcgatagcttactaaccgaaatggtttcaacatattgcaaccgattttacgctaataagcctgaactcgccgcccgtcggatcgaagccattggatatcaggtcggccaccagctctctgaacggtacacaatggagaggccacgttttagcgatcatttagaagcaatcaaattcatctgtaaggatttttggtttgaactcttcaagaagcagatagacaatttgaagacaaatcacagaggtacctttgtattgcaagataatcgttttcgttggcttacacgcatgtcaattgatcaatcacccgaaaatggaacattcgaagagctttctatcatggctgacaacaagactatgcaaagcatgca

SEQ ID NO: 3608 - DNA, 416 bp, Gossypium hirsutum
  unsure (1)..(416): unsure at all n locations; Clone ID: LIB3493-018-P1-M1-H5
gttcagctaaatctcaaccagaattacaattacttgagccagcctgagcaggaatacttcgataccatgggtttcgtagaagagaagccactggtcaatcagtttgcatatgtggaccctgttcctacgtctatagatgctggatttaatcaatcagataatgcccccttgtacttcaattcggaccagggaagtaactccatcaattgttccgactatggctggggagaacagggtgccagaactcctgaaatatcatccattcttgaagcttctgtagtgggtgaagagtttcttgaggatgctaaccctagcaagaagctgaaaccaagttctgacaatgttatgcatgctgaagagaactccgcaaagaccttgtcggacgagctgntggtttggacaaccagatgaaatac

SEQ ID NO: 3609 - DNA, 271 bp, Gossypium hirsutum
  Clone ID: LIB3493-018-P1-M1-H6
cgaagaagcaaattgaagctaacaatggcggagcctaaaaccaaatacgatcggcagctcaggatctggggtgaacaagggcaagcagctctagagaaagcgagcatatgtttactaaattgtgggccaactggttctgagactttgaagaatcttgtccttggggtgtcggaagcattactatagtcgatggatctaaggttgaattcggcgaccttggaaacaaatttatggtggatgactcaagccttggcagtcaaaagccaaatgt

SEQ ID NO: 3610 - DNA, 420 bp, Gossypium hirsutum
  unsure (1)..(420): unsure at all n locations; Clone ID: LIB3493-018-P1-M1-H7
gtaacctttggagataattttnggatctgaaaccagagagagagatagagagagagtatgaatcgccaccacgatccaaaccctttcgatgaagaagaagtcaatccattttcgaatggtggttctgtcgcacctgcacgaccactggcatccgaacctctgggttttgggcagaaacatgatgctactgtggatatacctctggattcaatgaatgattctaagaaaagagaaaaggagctcgcagcttgggaagctgatcttaaaagaagggaaaaggatataaagagaagagaagatgctgtttcccaagctggtgtttctgtagatgataaaaattggccaccaattttcccgattatacatcatgatatagctaatgagataccggttcatgctcagaggctgcaatatcttgca

SEQ ID NO: 3611 - DNA, 439 bp, Gossypium hirsutum
  Clone ID: LIB3493-018-P1-M1-H8
aaagaccgtagatatacattttatgattgcatcagtccattttttgttgaatcccattctaaacatcacttcctttaaaaaatcccactccactctatcgtatgccttgctcatatcgagtttaactgtcataaacccttttttttccaaatctcttttgcttgagcgcgtgtagtatctcataggctaataacacattatctgataatagtcttcccagtacaaaagcactctgtgcgcaatcaaaacatttttcaattactcgtaatctgttcgccatgttctttgccaatactttgtataccaaattacgtagactaatcggtctaaagtgtcatatttgaaggactagcactttttggaataagcactaatattgtggatttatagaattaaccttcatgtctccattcaaacgggtaaacaaaagaaaatcatg

SEQ ID NO: 3612 - DNA, 260 bp, Gossypium hirsutum
  Clone ID: LIB3493-018-P1-M1-H9
gccacgcgttcgactaatacacatactgctatatgaagagagaagattgatcagacggcagaaaacttgctatcacgtgataactgagagaacagccacagtatgggctggcagagatccttgaggagtattgactgcttacacttacactatcaggaacactggtgctgatgcagttttcgaaaatggaatggctgtggaatctgccacactgatcttcatgaagccactactgatcttgtgatgtcaaactacccaat

SEQ ID NO: 3613 - DNA, 316 bp, Gossypium hirsutum
  Clone ID: LIB3493-019-P1-M1-A10
caggccggtatccaggtcggaaacgcttgctgggagctttactgtctcgagcatggaatccagcctgatggtcagatgccaagtgacaaaactgtcggaggaggtgatgatgcttttaacacctttttcagtgaaactggtgctgggaagcacgtccctcgtgccgtcttcgtggatcttgaacccactgttattgatgaagtgagaactggtgcttaccgccagctcttccacccagaacaactcatcagcggcaaggaagacgcagctaacaactttgcccgtggtcactacaccattggcaaggagattgtcg

SEQ ID NO: 3614 - DNA, 370 bp, Gossypium hirsutum
  Clone ID: LIB3493-019-P1-M1-A11
atggctacttgtgcttggttactctccctttgctttactctcgttttctgtctgtgtaatgcctctcgtacgccacccatttccccatcccttgatggatttttgaccaatggtaacttcgagcaagcacccaagaaagagaacctcaacaaaacagtgatactggggaaatactcgcttccaggatgggaaatcgatggcacggtggagttcatgtcagggggacctcaacctggtgggttttacttccccattccacgtggtgcccatgctgtgaggctgggcaacgaggcgtccatctctcaaaatgtgaatgtcaagcctggcttcatttactccataacatttggtaccacaaggacttgcgccc

SEQ ID NO: 3615 - DNA, 368 bp, Gossypium hirsutum
  Clone ID: LIB3493-019-P1-M1-A12
cggacgcgtgggttgatagcttacatccaagctcatggagagggttgttggagatcccttccgaaagctgctggccttctccgttgtggtaagagttgccggcttcgatggattaactatctccgccctgatgttaagcgaggtaattttaccgacgaagaagatgaactcatcatcaagttacatagccttcttggtaacaagtggtcaatcatagcagggagactacctgggagaacagattatgagatcaagaatcattggaatacccacataaagaggaagctagtgagcagaggtattgaccctttgacacatcgaccggtcaatgaacaagctgcaattaacaccatatatacagtctcatt

SEQ ID NO: 3616 - DNA, 515 bp, Gossypium hirsutum
  Clone ID: LIB3493-019-P1-M1-A2
acgtatatataaaccctaagttaggtgcagggaaaagagagatggcggcagttcccggacagttgatttgtgaggtagtgaacaagaacaattgcttttaggtgaggcagtttggaagaggaactgctagtcttcagttcagcagagagccctacaatctctacaaccttcactcctacaaacactctgggttgtcaaacaagataacagtcaccattcaatgtgggggcaaacactagtctgtgctgctagcaaccaccaagactaataagctgaacaagcctttggccttgcttcacgagtcctttatgaaataggagttgcccaggatggccaaggcggtcaaaaaccaggtgacagacatctactacaggccagatttaacaaaagcaggccttgctaggttgagtgctgtgcacaggaatctaaaggtagccatgtctggtgttaagaacaggaacaggcaagcattgaatgttcgtggcttgaagtgagctacacctttacgttgtatg

SEQ ID NO: 3617 - DNA, 455 bp, Gossypium hirsutum
  unsure (1)..(455): unsure at all n locations; Clone ID: LIB3493-019-P1-M1-A3
taatcttctttccgggccctcctaaagatgtcaaaaattgacaataacaatgctccatggcaccgtctcaggcgtgcttccacaccagggaaggcaacggtgctcgccatcggcaaggcctttccacggcaactaattcctcaagaatacttggtggagggctatatacgcgatacaaattgccaagatgtctccatcaaagagaaactggaacgtttatgtaaaacaactactgtgaagactaggtacacagtgatgtgcaaggagattntagatcaatacccagaattggcaactgagggttcatcaactatcagacaaaggcttgaaatagcaaacccccgcagttgttgagatggcatntgaagcaagcttagcttgcatagaggaattgggggaggcctgaactgatatcacccaatataatctatgtctctttcagtgaaatacgctta

SEQ ID NO: 3618 - DNA, 404 bp, Gossypium hirsutum
  Clone ID: LIB3493-019-P1-M1-A4
acgcccacgttgagatcggatcagccacacatctcaaagccttgctcataggcttcaaaatcttcgccttgatttcagtttcgacgaagcaaacaaggagttcaacgcctcctccaacaacaaataagtcttctttctttcttttctttcttataaatttattttcatgcaatagataaggaatgacgaaacagaaatgaaaatccaagaagaatacaatctaaaatcaccttaaagctaatttcgaatggatttttagtatctctgctattctctttgtgactagaagaaaaaagaaaaaaaaccccccatttatatcgtttttcttcggttttatagcccgaaaacaaaaattaattaattaaattaaaaattttaatttcatcattgtcatttgctgtcta

SEQ ID NO: 3619 - DNA, 384 bp, Gossypium hirsutum
  Clone ID: LIB3493-019-P1-M1-A5
gcaacatttgtctgggacacgtatgttgaacagcgaaatagttggggtactacaaggagcttcaaaactagaaaaggttttggttcagatggtggtcgaagattccgtagaatgtgaagatggaggaaaaggaattattagagaaatgtcgccatacgaggttgattcaatcatattgaagcttttgagacaatggatagatgaaaggctaaaaaaagggaaagatcttctttctagagcaaaagaaaccgaaaattggaatcccaagtccaaatccgagccatatgcgcagtccgctgaggagctactgaatttggccaaggaaatggtgaaagatttcttcgaaattccaatcggaattaccaacgatctgatttctgatct

SEQ ID NO: 3620 - DNA, 73 bp, Gossypium hirsutum
  Clone ID: LIB3493-019-P1-M1-A6
gtcgtctaaccacctcataatacatacacctaagctctacttgccacacagtgtggccatacacacagtacgt

SEQ ID NO: 3621 - DNA, 434 bp, Gossypium hirsutum
  unsure (1)..(434): unsure at all n locations; Clone ID: LIB3493-019-P1-M1-A7
gtttactggggttcgtcttggttggactgttgttccaaaacagcttctgttctcagatggattccctgttgccaaagacttcaaccgtatcatttgtacttgctttaacggtgcatctaatattgcccaagctggtggcttggcttgcctttcacccgaagggctcgaggccatgcaagaggtgatcggcttctataaagaaaacaccaaaattatagtagaaacattcaactcgcttgggtttaaagtatatggaggaaagaatgcaccatacgtgtgggttcacttccctggccgtaactcatgggatgtgttcagcgaaatactcgagaagacccacattgttactacgcncctgaagtggtttccgacccctgcgggtgaggtttcatcagagtcagcgcatttggtcacaggggagatgtcttggaagc

SEQ ID NO: 3622 - DNA, 412 bp, Gossypium hirsutum
  Clone ID: LIB3493-019-P1-M1-A8
atgcaaatgaaggaagtcgcggcttttcttgctcatgtcggcgccaagacatcttgtggagatggtgtcatagacggaggaccgttggcttggggtctttgcttcaagagagaaatgagtcctagccaggattactgtgatgattactacaaatacatgtatccatgtgcccctggagctcaatactacggccgtggtgctttgccaatttactggaactacaactatggagctgctggcgatggtataaaagttgatttgttgcaccaccctgagtatctcgagcagaacgcaactattgccttccaggctgccatcttggggttgatgaccccaatcaagaagaaccaaccttcagcacacgacattttcctgggaactggaaccaaccaagaatgacaccagggaaaac

SEQ ID NO: 3623 - DNA, 363 bp, Gossypium hirsutum
  unsure (1)..(363): unsure at all n locations; Clone ID: LIB3493-019-P1-M1-A9
gagttcggcgctacgcctcacgctttcgttgcaaagctacatacactactccctctgaaacagccgcaaaccgcccaaaaaatgaaccaaaaatcctaatttttatttcttctttaactcctgtttcttgttacgaagcatcaaatccttgccgatttgaatctatgtattgtgtttttctcgagaacgattaagagtgggcaagcaaataccactttccttttcttttgcgagtttcgtcctttttttttgtcggttgatgaagaattgtcaccgatggcagaggattctcatcctctctttgctatctttctctgtattcgctcccntcgtgttggtctctcagagacttaaaaccctcac

SEQ ID NO: 3624 - DNA, 425 bp, Gossypium hirsutum
  unsure (1)..(425): unsure at all n locations; Clone ID: LIB3493-019-P1-M1-B1
ctttcattgaaaagccacaaattgaaagcggtgataaaattatcatgcctccatctgcacttgatcgcttggcatctctgcatattgattatccaatgttatttgagcttcggaatgatgctgctgagcgtgcctcccattgtggagtgctagagtttatcgcagaagaaggcatgatctatatgccatattggatgatggagaatttgctcctacaggagggagatattgtgagggtgaaaaatgtaactcttccaaagggtacctatgttaaattgcagccccacacgaaggactttttggatatttcaaacccaaaagctatcttagagacgacactcaggaattattcctgtttgactactgnggacagtattatggtggatataacaataaaaagtctacatagatatatagagacgaag

SEQ ID NO: 3625 - DNA, 420 bp, Gossypium hirsutum
  Clone ID: LIB3493-019-P1-M1-B10
cggacgcgtgggcggacgcgtgggccgtcatagcctactctcacaagacctggaaactcgattctggtcagcctatgcactccgagtccggttattggcgtcctaaacctgatggctctcttgaagttgtcattgctcagagcactggccttgcggaagttctcaaggggacctacagtgcagaggacaatgtcatcaagcttcatagccaagtcgtagccaatgcttccaaggtgagggagataagtcgagtttacgagatggttaatggagatctacattatgttgttcaaatggccaccaatcttaccactcttcagccacatcttaaagctgtgctcaagaagctgccataaaacttcaaaaggcagattgttttggctacaaaagatattgcaattgggtggccaagtcacaatc

SEQ ID NO: 3626 - DNA, 374 bp, Gossypium hirsutum
  Clone ID: LIB3493-019-P1-M1-B11
cggacgcgtgggtgaggagttgcctaagttgttagaagaagctatgataaaaaagcgaagcgaggaaaatggtgagctaaccgacagtgacaaggactatgatttgttgcctaaggtggttgaattctcggaagagaacgggcatggaagtaaagaaaagcctgtgttagagatcccatcggagcgtcctgaggagcccaaaaatgaaaactcccgaaagttaaacaatggcttgaaagatgaggctcttcaagcaaatgaaatggagaatgtgaatggaaaagtaaagaaagaagatgaaagaaaaagtaaggatgatccggtcgaatttaagatgtgggaaagctgcaaaatcgaaaagaaagaattctcac

SEQ ID NO: 3627 - DNA, 486 bp, Gossypium hirsutum
  Clone ID: LIB3493-019-P1-M1-B2
ctctactcgaaccgagtctcgcgctacggtcgagatcgctgccgatttggactcacctgatgaagaccgcatcgaaaaactcacggtagttcttgacttggatgaaactctagtatgtgcatacgagacatctagtctgcctccttcccttcgtaatcaagcaatggatgctggattaaagtggtttgagctggaatgtgtatcttcggacaaggaatgtgaaggaaagcctaagatcaattatgttacggtgtttgagcgcccagggttgcaagatttcctaaatcaactaagcgaatttgctgagcttgtactatttactgctggccttgaaggctatgctagaccacttgttgacagaatcgatgctgaaaaccgggttagtcttcgactctataggccttctacagtagcaacggataccgggagcatgtgaaagacctacctgcatatctaaggattatgcccgactggtattgtgacaac

SEQ ID NO: 3628 - DNA, 385 bp, Gossypium hirsutum
  unsure (1)..(385): unsure at all n locations; Clone ID: LIB3493-019-P1-M1-B3
acgcaatgatgtatttccgtgcactgcagagcagttttataatttgttattaagtgacgactctagttttactaatgagtatcgtgcagtacggaaggatacaaatcttttgatgggacagtggcaccctgctgatgaatatgacggcctagtgagagagataacattcagaaccatttgtaacagtcccatgtgtcctccagacactgccatgacagagtaccagcattccattttatcacccgataagaaaaagcttgtttttgaaactgtacaacaggcacacgatgttccattcggcagctactttcaggtacaangcaaaatgggtgtgagaccaatggcgaaaattcgccattcctaatgtcagagtggtgcacattta

SEQ ID NO: 3629 - DNA, 358 bp, Gossypium hirsutum
  Clone ID: LIB3493-019-P1-M1-B4
ctccttcttcagaccatatgttgcaaagcatgaaaatgaaattgaccgtaatttgttagaactaaggactagagctggagatagggctgttctttactggcaaagagctgcaagctatggtcagacaagaatttttgacatcctgcagtatgttgcttcacagtcaacccccagacctcgccctgctcggaatccgcaggctcaaggtcccaggcctcgtcaaccatctggcatgcctaaccgtcaaccatctaataaagcacaaccagcacaactggaggacgaagaaccaccttctccgacatctagcacgtcttcgactcaacaccaaaaaggaagtggctgaaagaggtgggac

SEQ ID NO: 3630 - DNA, 412 bp, Gossypium hirsutum
  Clone ID: LIB3493-019-P1-M1-B5
caagaactgtccagatcttgttgtttttcggctatgcataatggggcgccacagggctgatcctgtgaccggtgaacccatggatgatgggtttggagccatagttatgaattgtaagaagctcactcgtcttgccgtatctggtttactgacagacaaagcttttggctacattggtcgacatgggaaattggtacgcaccttgtcagtggcttttgctggagatagtgacatggcgctgaaatatgtgctcgagggctgcccacagttgcagaagcttgagattagagatagcccatttggggatgcagctctgcgttctggtttgcatcactactacaacatgaggttccttttggatgcgtcatgcaggctaacgcaccatggtgccaggagatggtcgtgctatgcc

SEQ ID NO: 3631 - DNA, 403 bp, Gossypium hirsutum
  unsure (1)..(403): unsure at all n locations; Clone ID: LIB3493-019-P1-M1-B6
atataagcaatccataaaacttgcacttctcattacgcccaatttttaaagcaatttattttccatcgcttcatcttcaagatcaagagtaatccaaccgccaattcaattccccccccctttttttaatctttttcttttcattattattatcattgttgaatccttaatcgttttcttcttcacaacccaaaaccaaatttcagtataaaaaactctttcaatggcgtctctgacctcaatttcccaatcccacacacttctcaaaaaacccaacttcacaccctctattcctcacaatttgtncttcagtttcaccccccgggacttcctgtttccaaaacgcagcgtttaaactcccccagatggcttcccggagctacgtctgtcggcctgacgacgg

SEQ ID NO: 3632 - DNA, 131 bp, Gossypium hirsutum
  Clone ID: LIB3493-019-P1-M1-B7
atgatatgtaatacgatgagttatgtctctaggctgcaactacttggactgatgatcttactctgtatgacaagtcagtgggatgtggaatacagtggagtgataatggttagtcccaagaacttttatct

SEQ ID NO: 3633 - DNA, 340 bp, Gossypium hirsutum
  Clone ID: LIB3493-019-P1-M1-B8
ggaattcagaaaacagtttctttctttatttttttctgtttggttgactggaaaaagattttgaaagtactttgctcctggagaaatgttaacatgtgtgagaggaacagtgtcagtgaagaaatttctgggctgtatttataagttacaggtgatttggccttgaatctgcaagttttgatatagttgtagtgaatttctatttgcgatatatgcatggaaacaaattcaggtgttacagtgataggagctgaagctccttcaacttatcatatggcgccgaggactgaaaatgctaaccagatcagcagtggtttaacaccagtcgatggtttaacac

SEQ ID NO: 3634 - DNA, 435 bp, Gossypium hirsutum
  unsure (1)..(435): unsure at all n locations; Clone ID: LIB3493-019-P1-M1-B9
ttccattgcagtttctcttacacattatcattattattgcccgttttctgtttttctagggtttttcaatctatacctcttctcactaatcatgagtcgtcatccagaggtaaagtgggctgaaagagctgacaaggtttacattacggtgctattaccggattcgaagaatgtgaaggtcaatcttgaacccgagggagtgtttacactttcggctaatgccggagctgacaacaacctttatgaattgaagttggatctttatgataaggtcaatgtggaggaaagcaaaattagtataggagtccggaacatagtttgtgtgttggagaaagccgagaaagtgtggggaaaaaactattgcgcgggaaggcaaggccccncattatattaaagtggattgggacaaatgggtcgatgaagacgaaaagaatg

SEQ ID NO: 3635 - DNA, 403 bp, Gossypium hirsutum
  Clone ID: LIB3493-019-P1-M1-C1
gaggaaaataaagagagagagatctgaattataatctctcttttcttcttttctccaccaaagaaaatctgattttaattttaatccattaatggctgatgaaccttctctcactcgatggtcttttctggattttaaactattttatgatgccaagtttgggaggaagagattgcctgagccgcaaaatggtcaaactgctgatgagctcgactccaatggcactaattcgaacgtgacttcaaaagaaaaccaccctgtcaggaacacttctgatatggctatctacgagcagtaccggaaccagtgtacacactcggtgcactcaaatggcgcggtgtctaatggatttgattcgagaccgcaaaggtctctgctttctgcttttgaatctgcagaaatg

SEQ ID NO: 3636 - DNA, 410 bp, Gossypium hirsutum
  Clone ID: LIB3493-019-P1-M1-C10
ggcgtttccttttctggcgtagggtttattcgttagttccgataaatttattctattcccatggctgctccacctgcaagagctcgagccgattatgactacctcataaagctccttttgatcggcgacagcggtgtgggtaagagttgcctgcttttgcgtttttcggacggctcattcactacaagttttatcacgacaattggaattgactttaagataaggaccatagagcttgatggaaaaaggatcaagttgcaaatttgggatactgctgggcaagagaggtttcgtacaattacaactgcttactaccgtggagccatgggcatattgcttgtgtatgacgtgactgatgaatcatctttcaataacattagaaactggattcgaaatattgaacagcatgc

SEQ ID NO: 3637 - DNA, 345 bp, Gossypium hirsutum
  unsure (1)..(345): unsure at all n locations; Clone ID: LIB3493-019-P1-M1-C11
cggacgcgtgggtggtgagactgcaatggaaaaggccttggggtctataggaagctttagtaacaacaacaacaaggaggtgtttcttagagcagataagatagatttcaagagctgggatttgcaactggataagcacttgagcagggcttggtctagggacagtgatggttcaactctcacaaagaaggaagaatgggaaattgatttggctaaacttgatataaggtatgttatagctcatgggacttatggcaccgtttaccgtggcgtttatgatacccaagatgttgcagtgaaggtattggactggngtgaggatgggatgccacggttgctgaagct

SEQ ID NO: 3638 - DNA, 322 bp, Gossypium hirsutum
  Clone ID: LIB3493-019-P1-M1-C12
gatttttgacatgctgatgaagttgacagtaattgcaggcagaaatatttttaaagcaaagattcccatcatcagcaagttttggaaatctgctgatgaaattgaatcagaaagaattgccaaaatgatacatgattctgtgatgaggattgttaaaaaaagggaagagagagtagtgaacggagaagctgataacttcggtcgtgattttctgggattacttataaatgcttatcatgaggcggaccagaaaaacaggctttcgattcaagatttggtagatgagtgtaaaactttttattttgctgggcaagaaacagtc

SEQ ID NO: 3639 - DNA, 362 bp, Gossypium hirsutum
  Clone ID: LIB3493-019-P1-M1-C2
ctatgatcagctaaagctaaggagtgggggggcggatgaccgcaaccagccagacgccgtgaccaccaggaatcagttgcaggcagacgtgtcgctggtaaaggagaatgaggcattgcgaacggagcttttgaagatgaagatgtacatatcggacatgcagaagaacaatcaaactggaactagttcaaagagcgttgggaccagaaagcctaccttcttctcttccatgtccaagactctaggcaagctaaatcccttccgacatggctccaaggacacttcccatatcgatgataacctttggaagtgacgttaccaagcctaggagggagaaggtttcaatctcttgataccgcagc

SEQ ID NO: 3640 - DNA, 413 bp, Gossypium hirsutum
  unsure (1)..(413): unsure at all n locations; Clone ID: LIB3493-019-P1-M1-C3
caccaatcatctatggtgatgttagccgtcccaagccaatgactgttttctggtcatcaactgctcaaagcatgactcaacgcccaatgaagggaatgcttactggccctgttaccattcttaactggtcctttgttagaaatgatcagcccagattcgagacttgctaccaaattgccttggccatcaaggatgaagtggaggatcttgagaaggccggtatcaatgttatccaaattgacgaagctgctttgagagaagggttgcctcttcgaaattccgagcacgccttttacttgaaatgggctgtccactccttttaggatcactaacttgtgggtncaggacactactnagatccacacccccatgtgctactccaacttcaatgacattatccactctatcatcga

SEQ ID NO: 3641 - DNA, 431 bp, Gossypium hirsutum
  Clone ID: LIB3493-019-P1-M1-C4
gaacaaagcagagtcggttcctctctatgtgaatgttaatgggaagaaactcgttctcggaacactttcccaccagaattgcccgcaattgtgttttgatttagtatttgagcaaggctttgagctctctcacaactggaaaaatgggagcgtctatttccttggttacagaacttttgtcccagaggaaggctctgatgatgaatttgatagtgaggaagaaagtagcgaggatgaggaacttcctgtggctgctgaaaacggaaaagctaagacagatgcaaaaacggctaatgctgggaaacctgatgctgtaaaacaagctgtcaagataactgaaccaagtgataacaagaaaaatgaggacgatgatgatgatagtgatttcgaggagatggaagggtctgatgaatgagatgatttcgaggatg

SEQ ID NO: 3642 - DNA, 481 bp, Gossypium hirsutum
  Clone ID: LIB3493-019-P1-M1-C5
agacaatgttacttgggaatccctgttccctgaatggattgacgaagaagaagtatttgaggttcctaattgtccttcactacctagtcttcagtttcctggaaaaccacggattgatcttattgctgttaagcttccttgcaacaaggcagggaagtggtcaagagatgtcacacgtctacactttcagctagcagcagcaaggcttgctgcatctgctaaagggcttcacccagtgcatgtgctttttgtgactgactgcttcccgcttccaaatctttttgcatgcaaggaccttgttgcacgtgaaggaagtgcttggctgtatacacccaacctacataggttaagagaaaagattcgacttgccatcgggtcatgtgaaccttagttcctctccaggcttaagggtcttctattcagagagagcacaccgtgaagcatatgcaacaatcctacactcagctcatgtatttgttgt

SEQ ID NO: 3643 - DNA, 419 bp, Gossypium hirsutum
  Clone ID: LIB3493-019-P1-M1-C6
ctcaatttcaagaagcacgaaaaaaaatcaaaatcttccaaaagagaaaatttaaaagatggtttgtatagcttgcctattgccactcttcctcgtaccgatcgtcaatattttgcctctcctcttctatttcatcatgggtaaaatttactggcttcttggatgggaataccggaaaccggagagggcacctgcggcgtgtccgtataagccgcctgcaaaaacggaaaactctagcaaagttgggccagaaactgaacctgctgtaccagagtctagttcgaaaccaatgggagtaacagataacaagcaggactgataactgaagtttgaaagtggttccatggaacaaaatccaggcaaaaaatgtattatctttttgaagattaacttcttaaagttggtggattgatctgaac

SEQ ID NO: 3644 - DNA, 355 bp, Gossypium hirsutum
  Clone ID: LIB3493-019-P1-M1-C7
ctctccttccttatctgctttcacttctcaagtgctgagccgtttattggagtgaactacggccaagtggcggacaacttaccgccgccatcagccaccgcgaagcttctaaaatcgacgtcgattgagaaagttagattgtacggagcggatccggcgattatcaaagctttggctaataccgaaattgggatcgtaatcggagcagctaatggagatattccttctttggcttccgatccaaactcagcagctcagtggattaactccaacgtgttgcctttttaccctgctagcaaaatcatcctcatcactgttggcaaacgaggtattgactacaaaatgacccgattta

SEQ ID NO: 3645 - DNA, 456 bp, Gossypium hirsutum
  Clone ID: LIB3493-019-P1-M1-C8
tcccccgccctctcccttcagcacccaccctctcatggcacgactccgaacccgaatctaattcccttcaagaaacctcccagctcgaccctcttagttccaacaccacattggaagtgcagctggaattgcaccatgtagacgctttatcttcggaagatactccggagctactcttcgacttacgactccaacgggacgcgctgcggtctggaactatatactctcttgtctccaaagctgttgcgcggaaccctccacgcgccgccggtaggcgttctgggttcagtagttctattatttctggactcgctcaaggtagtggagagtacttcacgcgcctaggtgtgggtactcctgcgaggaatctttatatggtgcttgacactggtaggcgacgtggttgggtccagtgttcaccttgcagagttgctactctcaatctgaccccaattt

SEQ ID NO: 3646 - DNA, 453 bp, Gossypium hirsutum
  unsure (1)..(453): unsure at all n locations; Clone ID: LIB3493-019-P1-M1-C9
cttgaattcctgatgtcttcaccccaagagatgttgctgttattattttgttgctctttgtttttgaacctttctttaattcttcaaggtcctgtttatgaagtttgaggcttttatttatttaaaatttacgtttcctgtcaaggactaggaaaaggaaacttcatgctaatcacttttagaaattttggttctctgggaccagtttttattcagaaccaaatgcgaggttcctgctatctccttcataaatgagtgaactgaagatagctttgcttcaataagtcgtgacctaacttttaggatacttntgcagtatcatttgcttctaatattatctgtgttcttttatctatattgacatgttatctagctggcagagaaaatagcggacctttccagtcgattttcaagcctggccagttgtccttgaatctgtctattacccaacca

SEQ ID NO: 3647 - DNA, 386 bp, Gossypium hirsutum
  Clone ID: LIB3493-019-P1-M1-D1
gggaaagtgaaaggaaaaccaggaggaaaagagaaagttttctagtgatcatcatcatcttcttcttcttcttcttcttctttagataagattcataaggccatgaaccgaggtgtgttgcagagctcaccagtgcagcaattgatggccggaaaccctaactggtggaacatcaacaccatgcgcccaccaactcatcatcatcaacaagcagcggcggtggcggcagcaccttcttctttcttgcatcctactcccactactttcttccctcacacacccacttcttctccttcgtcttcttcatcttcttcacttcccgttccttcttggcatgataataaccaggagcttcctgagtcatggagtcaacttctcttgggtgg

SEQ ID NO: 3648 - DNA, 310 bp, Gossypium hirsutum
  Clone ID: LIB3493-019-P1-M1-D10
ggcaaagtcacttcctagagaaatgctgattaatctagtgaactgcttggaagcttctgccatatgtcttgtatgcaaagatccacctgatgaccctgttgttaccatgtgttgtcatgttttctgctaccagtgcgtgtcggaacatctgactggtgatgataatacatgccctgcacgtggatgtaaagaacaacttggtgctgatatagttttctctagaagtactcttaggatctgtattacggatggttataatggtagtcttgtgcatcctcagtttgaaaattcagtgattttacaggatgag

SEQ ID NO: 3649 - DNA, 365 bp, Gossypium hirsutum
  Clone ID: LIB3493-019-P1-M1-D11
cttccttgtatctttattttctcgcctttgacgaggagccgacgctaccatggttcacgtcagtttctaccgcaactatgggaagacctttaagaagccacgacgtccgtatgagaaggaacgattggatgctgagttgaggcttgtaggagagtatgggctccgatgcaagagggagctgtggagggttcagtatgctttgagccgcatccgtaatgctgctagggaccttctcactcttgatgagaagaaccctcgtcgtatttttgaaggtgaagcccttcttcgtaggatgaacaggtatggacttttggatgagagccagaacaagcttgattatgtcttggctttgactggtgaaaact

SEQ ID NO: 3650 - DNA, 424 bp, Gossypium hirsutum
  Clone ID: LIB3493-019-P1-M1-D12
ctcaaagaaaaaaattgagtgtcagtttgaaagtgttcttcagatatggctatgaaacaagttgctaattctgctatcaaagcaattgccaattctgggtcatcctctcttcttaccagacaactgcatgcttctccagggagcaaaaagattgtgggggtgttttacaaggccaatgagtactttacgaagaatcccaactttgttggttgtgtggagggagccttggggttgcgccaatggctcgaatcacaggggcatcagtatatcgttaccgacgacaaagaaggaccggactgcgaacttgaaaagcatatccctgatctccatgtgctcatatcgaccccattccacccggcttacgttacggctgaaaggatcaagaaagccaaaaacttgcaactgcttctcacagcagggattg

SEQ ID NO: 3651 - DNA, 185 bp, Gossypium hirsutum
  Clone ID: LIB3493-019-P1-M1-D2
atcggaactggttacgatctctctgtcaccactttctctcccgacggacgcgttttccagatcgagtacgccgccaaagccgtcgataaaagcggaactgtgattggaattaaatccaaagatgggatcgttatgggagtggagaagctgatagcatcaaagatgatgttacctggttctaatcg

SEQ ID NO: 3652 - DNA, 424 bp, Gossypium hirsutum
  Clone ID: LIB3493-019-P1-M1-D3
ctctgcataacaggctcggaggcaatgtttgctgatcttggtcacttctcttatgctgcaattcagactgctttcacctttctggtttatccagctcttatattggcatatatgggtcaagctgcttatttgtctcaacatcatcatacaagttaccacatcagtttctatgtctcagttccagatagtgtgagatggccagtgttagtaatagcaattctggcttctgttgtgggaagccaagcaatcattagcggaacattctcaatcatcaatcagagccaatcactttactgttttccctagagtggaggttattcacacctccgacaagatacatggccagatttatatccccgaaataaaatgggtgctcatgatccttgcatcactgtgactaattgatttagagacacaaaacaca

SEQ ID NO: 3653 - DNA, 528 bp, Gossypium hirsutum
  unsure (1)..(528): unsure at all n locations; Clone ID: LIB3493-019-P1-M1-D4
ggatttggtcaagatattccggagacaacggtccatcctgtgccgccagtgccaagcaagacggtaagattttcgactgtaaatattgaagagatgggtacaatgaatgagaaatatcagtcgcctaggattcctgaaatagagatctcaactccaactccaaatgatggaatggacaaggaaccaatgcatagcaggaagaaatggaacaatgaggagagccctcctaaagcagccaaagggtttagaaagcttcttttctttggaagaaaaggcaaaaactatgctactgcttagtgtatgcttgtctttccatattgcttatgccttcggttttcaattttttcgggtggaacgtaccaattagggcctttgtgttgctgccattcaaggattcatgaacttataaaataaaattggtgaaaaaaagagagagattcgtaatggaatttattcttgttgatatatatggttngaggttaaaccatttctttttgtgatggtacccttgatttgaatattgaaatt

SEQ ID NO: 3654 - DNA, 359 bp, Gossypium hirsutum
  unsure (1)..(359): unsure at all n locations; Clone ID: LIB3493-019-P1-M1-D5
ctgttttcggttcccacggcaccaaaagatcccatactaattaacgcatgtttcgaacaaaaaacaaaaacccaaaacttcagatccctctctatttgtttgttccttcttcctctggaaattctttccatttatacaaaaactcaaccccaaaaagaaattcaaaggaaaaagataaaattaagcaaccatggagatggagatggacatgatggagaacttgccatctaccatatccncattactcctccggtcgatggcttcttctgtttttatttatgctgacaaattgttcttcaacttagctgagtaattcaagccctttgaaatcattcgttatgttctcatcacttcctttc

SEQ ID NO: 3655 - DNA, 432 bp, Gossypium hirsutum
  unsure (1)..(432): unsure at all n locations; Clone ID: LIB3493-019-P1-M1-D6
ctcaaaaacatggacgctattcctcccattgatgcactcaaccctaccgagttcaatggacccggtgttggcattcacgaagatcatgttgtcccaaaaggttccgaaattggtactcttggttttggttttgaaggtggtcctgaaaaatgttgttcttctggatgttccggtaattgtaatcctggtggtttcgttctaccatttcctcaaattccagaaatcccaagaattccacagatcccacagatcccacaaatcccacaaattccactaatcccacagatcccacaagtcccacaaatcccactaatgccaggacagtcgggatgtgagagtggggagtgttaccgtcagggtttgggtgggacttgtgctgagtgtggtcagnccaggtgcgcatcaggatgtgccaggctgaaactgtaagag

SEQ ID NO: 3656 - DNA, 434 bp, Gossypium hirsutum
  Clone ID: LIB3493-019-P1-M1-D7
ccaattctttatcctcaaatcgatttcccaaaatccccaaatcaaaatacctttgattttcgtcgaagtccctttgattctcttttttttttcattttcattttcatttatcattgaaagaaaataaaagaggaaaaaaaaacgttctgataaacttgaagaagagatggcaaaatcgttgaagccagcgtcctccgataaagaactgtacaatgtttcgagttcatcgaagaggagctaataaacgctcatgtcaacggcgaagaagacgatgaggaggagattgaagctgttgctcattccgccgacgccttcgacaaagattaaaatctaaaatattaaaatcttgaagttttttattttagctaaaattttattagctttttatataattttacagtttcttttttgtataaagttggtctttaaaaatt

SEQ ID NO: 3657 - DNA, 351 bp, Gossypium hirsutum
  Clone ID: LIB3493-019-P1-M1-D8
cggacgcgtgggcagaatgcttctaatctcattcatatagtgccctattcattatctttttttttttttctattttctccctttatttgttcctttttttttttggttattctgagtttgtgtcctgtatcagtgtcgtgttgcaaaaatgtattgagaattttgctataatatattaatggcacttgaagtaacaaaaaaaaaataataaaataaataaaaaaaaaaaaaataattataaataataatatataattattaaaataattaattaaaaaaaaaaaattggggggggccttttaaggggttccaatcttatttccgcttgcgtgcaactttttagtttttttt

SEQ ID NO: 3658 - DNA, 409 bp, Gossypium hirsutum
  unsure (1)..(409): unsure at all n locations; Clone ID: LIB3493-019-P1-M1-D9
cgttatctcatcgcaatcatgatcatcccagaaaagaaccgcagggagatatcaaagtacctctttcaagagggtgtttgctacgccaaaaaagattacaacttggcaaaacacccagaaatcgatgttccaaatcttcaagtaataaagctgatgcaaagcttcaaatccaaggaatacgttcgtgaaacttttgcttggatgcattattactggtaccttaccaacgatggcattgaatttttaaggacataccttaatctcccctctgagattgttcctgctactttgaagaagcaaactatagggccccgtggtggcgntcccatgggtccttctgatagccgcgcccacgtggtccgncacgctttgtgcgacggtgagaggggcnaatcgggacagggatgga

SEQ ID NO: 3659 - DNA, 340 bp, Gossypium hirsutum
  Clone ID: LIB3493-019-P1-M1-E1
ctgggggctgcatcttggcacatgcccctggttctggaaaaacatttatgataatcagcttcatgcagagtttcctagccaaatatccacatgctaaaccactagttgtgcttccaaaaggcatcttggctacatggaaaaaggagtttgaaacatggcaagtagaggatattccactgcttgatttttatactgtgaaagcagataatagatctcagcaattggatgttttgaagaagtgggttgagtgcaaaagtatcctttttctgggatacaagcagttctctaccataaattgtgatggtggaaccagccagacttctatatcttgccgagagat

SEQ ID NO: 3660 - DNA, 467 bp, Gossypium hirsutum
  Clone ID: LIB3493-019-P1-M1-E10
gttgaaggcagatcccaagaagtatacaaggatgaaggagagattagttggtgtttctgaggaaactacaaccggtgttaagaggctttatcagatgcaggccaatggaaccttgttgttccctgctattaatgtcaatgactctgtcaccaagagcaagttcgataacttgtatggatgccgtcactctcttcccgatgggttgatgagagctaccgatgtcatgattgctggtaaggtcgctgttgtctgtggttatgggtatgtcggcaagggttgtgctgctgccttgaagcaagccggtgctcgcgtcattgtcaccgagatcgatcccatctgtgcccttcaggctctcatggaaggacttcaagttttgacccttgggagatgtgtcttcgaggctgatatctttgtcaccaccactggtaacaaggacatcatcatggttaaccacatggaggaagatg

SEQ ID NO: 3661 - DNA, 427 bp, Gossypium hirsutum
  Clone ID: LIB3493-019-P1-M1-E11
aggaagttggtggcgtggaagagcttcttcttcaattgaaaatcaattactaccccaagtgtccacaaccagaactcgctctcggtgtcgaagctcacaccgatataagtgcactcactttcattctccacaacatggttcctggcctccaactcttttaccaaggcaagtgggtgaccgctaaatgtgttcccaactccatcatcatgcacattggagacaccatcgagatcctcagcaatggaaagttcaagagcattctccacaggggtctggttaataaggagaaggttaggatctcatgggcagttttctgtgagccaccgaaggataagatcatccttaagccactcccggagactgtctctgagaccgaaccttcactgttcccttctcgtacctttgctcagcatatcgagcataagct

SEQ ID NO: 3662 - DNA, 363 bp, Gossypium hirsutum
  unsure (1)..(363): unsure at all n locations; Clone ID: LIB3493-019-P1-M1-E12
aaagctctcttctttccttttcttcttcttgtttcatcatttgtttaaaaaaaacccatttcccccacttttttttttttggctgatttcagtcagaaacatcaaattcctcttgggttgttcttataaaaagcaaatctgtttctgacattggtttgattcctttgataaaaagaacccatcttctcgtcttatgttccaatttttttctcagttaaaaaacaaagatcagctattcccctgttctggcgctgtttattgttcgggtattttcttcaaagtcaaatggggttctccgaaaagccacgaaatgatggaagattagagaatgaangggagaaatgggtgataccggatacctta

SEQ ID NO: 3663 - DNA, 321 bp, Gossypium hirsutum
  Clone ID: LIB3493-019-P1-M1-E2
aaaacatggcaccacaccttaatattgttccttccatgtttgtacttttattattattcatttcagcctctaaagtccaatcagatgcttttgatgttgttgccaagtttggcgcaaaagctgacgggaaaacggatttgagtaagccatttttggatgcttggaaagaagcatgtgcctctgtaactccatcaacagttgtgattcctaaagggacatatttattatcaaaagtaaacttagaaggtccatgcaaggctcctattgagattaatgttcagggcactatacaggcttcggctgatcctagtgctttcaaag

SEQ ID NO: 3664 - DNA, 425 bp, Gossypium hirsutum
  unsure (1)..(425): unsure at all n locations; Clone ID: LIB3493-019-P1-M1-E4
gtggagagccttttttgtgtagcgattctcagttagtcttttctttaagcttacagcttctctccagagttttataatgggtaaggagaaggttcacatcaaccttgttgtcattggccatgtcgactctggcaagtcgaccactaccggtcatttgatctacaagcttggtggtattgacaagcgtgtgattgagaggttcgagaaggaggctgctgaaatgaacaaaaggtcattcaagtatgcttgggtgcttgacaagcttaaggctgagcgtgaacgtggtatcaccattgatattgccctggtgaagtttgagaccaccaaatactattgcaccgttattgatgcacctggacaccgtgactntatcaagaacatgattaccggacctcacaggctgactgtgctgtctcattatgact

SEQ ID NO: 3665 - DNA, 420 bp, Gossypium hirsutum
  Clone ID: LIB3493-019-P1-M1-E5
gttttccatcactggtcgtggtactgttgccactggtcgtatcgagagaggtactgttaaggttggagagactgttgacattgttggattgaaggatacaaggaacgtcacagttactggtgtggaaatgtttcaaaagacattagatgacgccatggctggtgataatgttggttgttacttagaggtgttcaaaaggccgatattcagagagggatggttttggctaaaccagggacaatcactccgcataccaagttcagcgccattgtctatgtgttgaagaaggaagagggtggcagacattctccctttttcgaggttataggcctcagttctacatgaggaccactgatgtcactgggagggtggcttccattatgaatgataaagatgagggtctaaaatggttatgcctgg

SEQ ID NO: 3666 - DNA, 461 bp, Gossypium hirsutum
  Clone ID: LIB3493-019-P1-M1-E6
cggacgcgtgggcctgaggaaatgatacagacggggatttcaacaattgatgtcatgaattcaattgctagagggcaaaaaatccctctcttctcagctgctggacttccccataatgaaatcgctgctcagatttgtcgtcaggctggtttggtgaaacgtttggagaagactggagatctgcttgaggatggtgaagaagataattttgcaattgtgtttgcggctatgggtgtaaacatggagactgcacagtttttcaaacgtgactttgaggaaaatggctcaatggagaggtgacccttttcctaaacctggctaatgatcccacaattgaacgtattattactcctcgtatagctctcactactgcagaatacttggcatattgaatgtgggaaagattgttctttggatccttacagaccatgagtttcttatgcttgatgcctctcccgtga

SEQ ID NO: 3667 - DNA, 468 bp, Gossypium hirsutum
  Clone ID: LIB3493-019-P1-M1-E7
caaaaccctccaaaaaagactttgtacggaatgtcgcagttgttggagaaggcgaaggacttcgtggtggataaggtggccaacataaagaagccggaggctagtgtctcggacgttgatctgaaacatgtgagccgtgagtgcgtcgagtatggcgctaaggtctctgtctccaacccctacagccattccatccccatttgtgagatctcttacaatttcaaaagtgctggaagagggatagcatcagggacaataccagacccggggtcattgaaagccggcgacacaacgatgctggacgtgccagtgaaggtgccgtataacatcttagtaagcttggcaaaggatattggtgcagattgggacattgactatgaattggaattgggtctcaccaatgatcttcctatcatggggaacttcactatccctctctcttagaaagggaagatcaagctttctact

SEQ ID NO: 3668 - DNA, 378 bp, Gossypium hirsutum
  Clone ID: LIB3493-019-P1-M1-E8
tgagaaacctgcaatcttggtgaaaagtaatttaaataaagagaataacgaagcaaaagggagcccgtggtcttctattgcagaaaatattctgccagacctattatcttcctttgagaaagtgagggctgaaactgagtgcaaagatttgaaagatgtaaagccaggaatggttgctcggtttggcaaaatactttttcaagggagcccttccatgaacctgggaagtgttagtaatagttgcgttacagagacaatattgagtaaattgaaaagaaccttttacacgagtcttcctgcttcatacacgggaaacattatggctgaagttgtctcaaagattggagttgatttcgcagaggtgaaagatgtattcca

SEQ ID NO: 3669 - DNA, 380 bp, Gossypium hirsutum
  Clone ID: LIB3493-019-P1-M1-E9
gtttcctttctcgattttctatttagccaaacaagatgcagatcttcgttaagactctaaccggcaagacgatcactctcgaggtcgagagctccgacacgatcgacaacgtgaaggccaaaatccaagataaggaaggcatccctccagaccagcagcgtctgatcttcgccggaaaacagctcgaagacggccggaccttggccgattacaacatccaaaaggagtcaactctccacctcgtcctccgtctgcgcggtgggatgcaaatcttcgtgaaaaccttgactggcaagacaatcacttttgaggtcgagagctccgacacgatcgacaacgttaaagcgaagatccaagacaaggaaggcatccccccagac

SEQ ID NO: 3670 - DNA, 367 bp, Gossypium hirsutum
  Clone ID: LIB3493-019-P1-M1-F1
gcccaatgaagggaatgcttactggccctgttaccattcttaactggtcctttgttagaaatgatcagcccagattcgagacttgctaccaaattgccttggccatcaaggatgaagtggaggatcttgagaaggccggtatcaatgttatccaaattgacgaagctgctttgagagaagggttgcctcttcgaaattccgagcacgccttttacttgaaatgggctgtccactcctttaggatcactaactgtggtgtccaggacactactcagatccacacccacatgtgctactccaacttcaatgacattatccactctatcatcgacatggatgccgatgtgatcaccatcgagaacctacg

SEQ ID NO: 3671 - DNA, 438 bp, Gossypium hirsutum
  Clone ID: LIB3493-019-P1-M1-F10
cttatgaccactgtccattcaattactgctacccaaaagactgtggatggtccatcaatgaaggactggagaggtggtagagctgcttccttcaatatcattcccagcagcactggagctgccaaggctgttggaaaagttttgccggcgttgaatggtaagctgactggaatggctttccgtgttcccaccgttgatgtctccgtagttgaccttactgtgagactcgagaagaaggcttcttacgaagatatcaaggctgctatcagggaggcttctcagaccaccatgaagggaattcttggttacgtagatgaagatttggtctcaaccgactttgtcggagacagcaggtcaagcatttttgatgctaaggccggaatcgcattgaatgacaactttactaagctttgtgcgtggtatgatatatgagtgggg

SEQ ID NO: 3672 - DNA, 335 bp, Gossypium hirsutum
  Clone ID: LIB3493-019-P1-M1-F11
tttgatttttacccccggttccatagccttgttttttgtgggtgctgcacacatttttttttgaatttttttttttaaggaaaaaggggtatatttccttggatttacacccacaccaaacgatgggtgcctgctgttctacgcaattcaagtacaaaggtagacggtatgaaaaagaaggatcagatgaaaaagaggatgaggggcaccatcgagaccacaacatcaacagtgatgacaatagcgccaatgttaccaggattggacatgccggggctattgttagattgcaaggcttcttctccttgaccttaatgtacactcgcaagggcaag

SEQ ID NO: 3673 - DNA, 382 bp, Gossypium hirsutum
  Clone ID: LIB3493-019-P1-M1-F12
caagaaagctggatggggtgtgatggccagccaccgcagtggtgaaactgaggatacatttattgcggatctttcggtcggtttggccacgggtcaaattaagaccggagctccatgccggtctgagcgtctagctaagtacaatcagcttttgcgtatcgaggaggagctcggttcggatgccatctatgccggagctagtttccgtgctcctgttgaaccttattaggagttggtttgatgataaagtttgttgcgactggatgtgcgcgatagagctctactttcaatgaaatagttataataaccacatatggggttagtaagaacttttttttttcaattattttggacggaattttgtttccaaaaaaccataaat

SEQ ID NO: 3674 - DNA, 373 bp, Gossypium hirsutum
  Clone ID: LIB3493-019-P1-M1-F2
cggacgcgtgggaaaatttaaacgaaagggtgatgacttatttgtagaacatacgttgacacttactgaggcagtttgcggcttccagtttatactgacccacctagatggtaggcaacttctcattaagacccatcctggtgaagtggttaagcctgatcaatgcaaggccataaatgatgaagggatgcctatgtatcaaaggccattcatgaggggtaaactatacattcactttaccgttgattttcctgactccttggcccccgagcagtgcaaggcactcgagggctgtgctaccttgagggcctcagtccagctgacagacatggagcctgaatagtgtgaggaaacaactctattaatatgtcaa

SEQ ID NO: 3675 - DNA, 355 bp, Gossypium hirsutum
  unsure (1)..(355): unsure at all n locations; Clone ID: LIB3493-019-P1-M1-F3
cccacgcgtccgcaaaaggtgctgaaattggtactcttggttttggttttgaaggtggtcctgataaatgttgttcttctggatgttccggtaattgtaatcctggtggtttcgttctaccatttcctcaaattccagaaatcccaagaattccagaaatcccacaaatcccacagatcccacaaatcccacaaattccactaatcccacagatcccacaagtcccacagatcccacaagtcccaaaaatcccactaatgccaggacagtncggatgtgagagtggagagtgttgccgtcagggttgtggtgggacttgtgctgagtgtggtcagcccaggtgcgcatcaagatg

SEQ ID NO: 3676 - DNA, 385 bp, Gossypium hirsutum
  Clone ID: LIB3493-019-P1-M1-F4
gccgatctctccatatttgtcgggttagcaaaaaagaaattgtcatttagactcccgtgacccttcaacacccatttttcagttcttcgctcttcaagtaacgaaccaatggagaacaggttgaagccaatggatgctgagcagctgagagagtatggtcacaagatggttgatttcattgctgattattacaaaaccattgagaatttccctgttctcagccaagttgagcctggataccttcgtaacttgttaccggattctgctcctaatcaaccagactcttttcagcatgttcttgatgacattcaagcaaagatattgccaggggttactcattggcagagcccaaattattttgcataccatccttccaatagcagcg

SEQ ID NO: 3677 - DNA, 447 bp, Gossypium hirsutum
  unsure (1)..(447): unsure at all n locations; Clone ID: LIB3493-019-P1-M1-F5
cccacgcgtccgaacaggacatcgtcatcgtcggcggtggtatttctggcttggccaccgcccttgctcttcgcaggaaaggaataaagagcatggtgttagagagatcggaaacgctgcgagccgccggcgttggcatcattatgcaaccgaatgggtggcgtgcacttgatcagttgggtgttgccgccaagcttcggcagacttgcactgaaattccatcgggagtatntatatcagttgctgagggcaagtgtcgtgaatcagaattacctcttgggaaaggggaaatacgttgtttgaaacggatggagctgatgaaggcactagcggaggaattgcctggggaaagtgtgtattgggatgcccagcggactctatcctacttgacccttttacttccaaatccctttttcaacttcacgatggcactttaataaaagcaat

SEQ ID NO: 3678 - DNA, 361 bp, Gossypium hirsutum
  Clone ID: LIB3493-019-P1-M1-F6
gttacttccagccttacttctgaatttccagaagattgcaagttttatcctgcagatacgaaggacgacttgcacaagttcatgtggctttttaaggagcaaagactcacaacaccgcattggagaaatcaacggccttatcttattgctcaaaaagttgatatggtaccagatgactccagtccagagaagtgtacacttctcctcactggttatacgcctgctcacagcctctcagtgaaccagctggttcatgtgtctggtgcgggggattttcaattgagtagaattgaaattatgaaggatcctatccctttaaatgctaagaaagatcataatgctttggattctgatgacattc

SEQ ID NO: 3679 - DNA, 310 bp, Gossypium hirsutum
  Clone ID: LIB3493-019-P1-M1-F7
ttccaacactgttgcatccgctgctcttcttcttaccttgaacttgttgttcttcactttggttagctctacctacgtgccttgcccaccaccaccaaagagccacaagcctacccacaagagcccaccctcggcacctgaacagccaggcacttgccccagagatgcactgaaactaggcgtttgtgctgatttgttgggcttcagtgcgcgtgttgttggaccgtcgaggaccaaatgctgctctctcatttcgggtttggctgatctcgatgctgctgtttgcctttgcactgctattaaagctaat

SEQ ID NO: 3680 - DNA, 460 bp, Gossypium hirsutum
  Clone ID: LIB3493-019-P1-M1-F8
gcttgaaatggaccggatattacgacccggtggacgagcatacatccgcgattctcttgatgttatggatgaacttcaagatatcgcaaaagccatgggttggcatcctactctacgcgatacatccgagggtcctcatgcaagttataggatcttggtatgtgacaagcgcctacttggaagttgaaccaacagaactaaagactcgaaagccaaaacctcaccccttccgcaaattgaagacagctaaagcaagccttgcaaatgattgtttccaaataaaatacaagtcgtcaattacaagtgtcttaatatcatccagtcgtcggaccggaggaggaatgaggaggacatcagacacaattgggttcttaagaagatctgatttcttcagccaaaatgcagcccggggtatgttttacagtcctttggacttaatttaccatatatatatatatat

SEQ ID NO: 3681 - DNA, 354 bp, Gossypium hirsutum
  Clone ID: LIB3493-019-P1-M1-F9
cggacgcgtgggttcgtctggtgttcctatgaatcatggacctttagatcagatgccatcttctcgcaattatggtccccttggagtttctgctgatgaatatgctaggaatttccatttcatgaataatgttagaggctcgtataagagaaagacttctgaagggattccaggaaactttcagcattttaatgcctcatcaagctcgagttcctcagttacacagctaaataccaggcattctggatggggtgtcccagttgatcctgcatccttcaccattcctcagtatagggggaacgaccctccaccaattagagatgcagggtctcaaaagagtgtgaggaacagatt

SEQ ID NO: 3682 - DNA, 417 bp, Gossypium hirsutum
  unsure (1)..(417): unsure at all n locations; Clone ID: LIB3493-019-P1-M1-G1
ctccatattccaacagatcagttgccgctaactctcttagatctaacatttccagtttcttctccactcatgctgggtccccttatacaatagtggatcatacgtatgatgcagttgtggttggtgctggtggtgcggggctgagagcagccattggtctttcagagcatggatttaatactgcttgcataactaagcttttcccaactcgttcacatactgttgcggctcagggtggcataaatgctgctttgggaaatatgactgaagatgactggcgatggcacatgtatgacacagttaaaggaagtgattggttaagtgatcaggatgcaattcaatatatgtgcagggaggcaccaaanagctgtgattgaactcgagaattatgggctgcctttntctcgaacagaagat

SEQ ID NO: 3683 - DNA, 412 bp, Gossypium hirsutum
  Clone ID: LIB3493-019-P1-M1-G10
cggacgcgtggggccgatgaaaagatcaatggagaagttgactggtacagagtgcttggtgttcagccatatgccgatgaggacaccatttggaaacattacatgaagctggcttttattcttcatccggacgaaaacaaattcgcaggtgcaggagctttcaaacttctattagaagcttggagtttgttgtctgataaagcaagaagattttcttatgaccagaagctgaacttaaggggtagctttacgaatgttctacatgggaaatcatcaatggcaacaacaagctctaatggtttccataattcctacagtgttaaaaactcaaacatcggtgatcagcacggtgctacttattccaattctgctccttcttgctcaacaagaactgatacattttggacaacct

SEQ ID NO: 3684 - DNA, 480 bp, Gossypium hirsutum
  Clone ID: LIB3493-019-P1-M1-G11
cccacgcgtccgtgttcacatcatcataatgactaccctttgtaaaatgggaaactgggcggccatttagtgttggaagtcgggaatctaaatttccagctcatgcaactccaaacagacaaagcaaggtaccttttgaaggacaatgttcattcaatttcataacttctaccgcaaataactcctcacccaacacctgcttgcttatcaaatcattcacatgctcaaataatatgaaatataatcactaaattcaactctgaatactaaatgccaaaaggtcttgcacccaaaatcaatacaataattttttatttactcatttaatgttcaaaatttaaaactttcttaatagtaaatattaaaaatttttacttttttatttcttttaatataagcacacttgtattcatataacttatttgcgtataatatatacctttttttaaaataaaattaactataaagtgttttaaaaat

SEQ ID NO: 3685 - DNA, 380 bp, Gossypium hirsutum
  Clone ID: LIB3493-019-P1-M1-G12
gagagtggtctgaagaacaaaagcaggaatggctattgtctgaactaagtggaagacgtccattgtttggtcctgatcttcctaaaacagaagaaattgctgatgttttggataccttcagtgtcctagcagagctcccggcagacaactttggagcatacatcatttcaatggcaactgctccttctgatgttcttgctgttgagctcctacagcgtgaatgccatgtgaagcaaccattaagagttgttccactgtttgagaagcttgcagatctggaggctgcacctgctgctttggctcggctcttctctatagattggtacagaaatcggatcaatggcaagcaggaagtcatgattggttattctgattcgggt

SEQ ID NO: 3686 - DNA, 371 bp, Gossypium hirsutum
  Clone ID: LIB3493-019-P1-M1-G2
cgtattcaggtcaacagcctgatttgcattgagaagttctcagattttcctcaacttgggaggttcactcttcgcactgaagggaaaaccattgcagtaggaaaagtcactgatcttccttcgcgcagtagtgcttaaaaaattttgttcttagaggtaagcaaattgctgtgtaacttatcctgttgtgttgcagcacggaagagtggagggattgttgctttatctattattgcattacagatgtattgatgtaacaattatcaagggaagttgagatggttattgttgctgctctcattgagatgatgatatatggtatgaactcatgcacaccaacccaatggtcattaggggtaataaaatacgga

SEQ ID NO: 3687 - DNA, 205 bp, Gossypium hirsutum
  Clone ID: LIB3493-019-P1-M1-G3
tttttttactgttaatttccatcgcttgtaagcagtgattgttagcatgcatacaaggtgtttagcaccttgtcgggtagaagggatgagaaccgaatccatccttttctgtaaatccgggattttatgccctctccatgcttcttttaagccgactttattagttttttttctattttgagttgactgtggtggatgttactct

SEQ ID NO: 3688 - DNA, 421 bp, Gossypium hirsutum
  Clone ID: LIB3493-019-P1-M1-G4
gtccgaggctgaattggtgaataagtgggctttcgaaggggagaagataattcacggaaaaccctctggagttgacaactcagttagcacatttggaaatgtgataaaattcaaatccggtgttatgacccgcgtcaattccaatatgccgctgagaatgctcattaccaacacaaaagtcgggagggatacaaaggctttggttgctaatgtttcggcaaggaaatcaaggcatcctgatgccatgtgttccgtgttaaatgccattgaagctatcagtgatgaatggtctaccatcatccagtcgcatgctgtggatgatctatatttatctgccaatgaagagaagctcggagaattgatggaaatgaatcatggtttgcttctctttataggtgttagccatgcatcgattgaaaat

SEQ ID NO: 3689 - DNA, 493 bp, Gossypium hirsutum
  unsure (1)..(493): unsure at all n locations; Clone ID: LIB3493-019-P1-M1-G5
aagttgcactccaagaaagaagaggaggagaagaatttggtgtccagaaaggaagtcttcaaagccgttctttgccatcaagtcatgtcaattgctattaacctcttcacgtatgcggtaacaagagaaaaagatggtgaggcatctccaaagaaatcactaaccttgcttcttctagccaagcaattggtgatagcaatggtggtgatagatacatggtcgttttttgtacattggtacttgcatcagaacaagtttttatacaaacaccttcatgttccgcatcaccggcttgttgttccctattcatttggaggacagtatatgcatccaattggaggggttcttggacaccatgggcggaacattagctgtactcctcntccgcatgtctcctcggactgccatgttttctcctcctttaccatccttaaattagtggatgacattgcgggatgaagcttcccggaaaccccttttacctctttttaac

SEQ ID NO: 3690 - DNA, 362 bp, Gossypium hirsutum
  unsure (1)..(362): unsure at all n locations; Clone ID: LIB3493-019-P1-M1-G6
aaaaaaaaaaaaaacagaaatggctccgaaagcagatacccaatctgccggcgctgtcgccgcagctgacgcatcctctcaattctcaatggacccactattccacaccttgaaagtcgtcccctactccttccttcgccctccgcgcctccgcctcaagatcccctccgtctcccttccttccgccatgaccgtcttttctctcgtcctcctcacttacttcatggtggtctctggcttcgtctacgacgtcatcgtggagccccctggcattggctctacccaagaccctgctactgggcccgtncgacctgtgttttccttccaggccgagtcaatggtcagatatcatagaaggactc

SEQ ID NO: 3691 - DNA, 347 bp, Gossypium hirsutum
  Clone ID: LIB3493-019-P1-M1-G7
gtttggtgatggtgccgcagctgttataatcggggcagaccccatgcccgaaatcgagaagcccatgtttgaactagtctcagtagcccaaacgatcttgccagatagtgatggtgcaattgatggtcaccttcgtgaagttgggcttacatttcaccttcttaaggatgttccggggcttatttcgaagaatatagagaagagcctggtagaagcatttcaaccattgggcatatccgattggaactcccttttttggattgctcatccaggtggtccagcaatattggaccaggtagaagccaagttagcactgaagccagagaagctacgagccacaagggacg

SEQ ID NO: 3692 - DNA, 426 bp, Gossypium hirsutum
  Clone ID: LIB3493-019-P1-M1-G8
gctttttagaaataataaaaaaagttctcatttctgtttttgcacgctttctctcccttctgcgaaccccataaaaaaatggcgacatcttctagacgaacgagcggtccggttctccgatccctctccccatccggccgtttctgttctcactacgcttctcagtcttcatcttcttcctcttcttttgccttttcgagttcaagcttttcttcacgctcttcaactttctttaatcaacacagatctatctctccgccacgtgtcaatatgtacaaccactcttcatcggcgccatctgtgcgtttctcgctggataaccgcccgatctcgccgaaccgttcgatagccaccatccgtagaaacaccgacgctgtgcagaatttagagaagcgacagcagaagcggaccttgtatgtgttcccc

SEQ ID NO: 3693 - DNA, 208 bp, Gossypium hirsutum
  Clone ID: LIB3493-019-P1-M1-G9
ggaaactcgtgcctccgagatggaaagtccgatcccggcactacaatgaaggatctggtcggcggttactacgacgctggagatgctatcaagttcaacttccctgcatcttttgccatgaccatgttgagctggagcgtcattgagtacagtgctaaatatgaggctgccggtgaacttaatcatgttaaggagattatcaaatggg

SEQ ID NO: 3694 - DNA, 270 bp, Gossypium hirsutum
  Clone ID: LIB3493-019-P1-M1-H1
ggttcccaaaaactccttcaatatcctgggctcaacattttttttttaaagcctagtaaaatggcgtccacatttagcggtgatgaaactgctcctttcttcggcttcctcggagccgctgctgccctcgttttctcctgtatgggtgctgcgtacgggacggcaaatagcggtgtcggggtggcatctatgggagtgatgaggccggagctggtgatgaaatcgatcgtgcccgttgttatgggctggcagtttaggtatttatggggt

SEQ ID NO: 3695 - DNA, 366 bp, Gossypium hirsutum
  unsure (1)..(366): unsure at all n locations; Clone ID: LIB3493-019-P1-M1-H10
cgtaaagaagctgctgatcagtcacttaaggcttatgaggctgccacttccactgcaagctcagatttgcctccaactcacccaattagacttggcctggctttgaacttctcagttttctactatgagatattaaattctcccgagagggcttgtcatctggctaaacaagcatttgatgaggctattgccgagcttgatagccttaatgaagaatcttacaaggatagcacccttatcatgcagcttcttagggacaacctcaccttgtggacctcggatctgccagaggaaggaggtgagcaatcaaaagcagatgaacctcangttgagaagtaattggatgaaagagtattcttttaagac

SEQ ID NO: 3696 - DNA, 381 bp, Gossypium hirsutum
  Clone ID: LIB3493-019-P1-M1-H11
cgacaaacctgatctcagaggtcaagcagaaatgatagattacttcaaacagaatggaggacttgatcaagaatttaagtccttgcaacgtataaaagtcagagctgatggaaatctgacccctacccttattgatgattcgaaagctgctgatgaaactaaggctggttccgatcactctcctcttgcacctcctttgccaaaaacaccatccgagtcttggctttggcgtgctctgccttcaacggcatctagaaaatcatctttgcagccttacaccggtactcgttttaaacctaagaaacaagaacctaaggaaccttctactgataccaagtgggaaacaattgtcaaaactttctacttgcatcatgatcatgt

SEQ ID NO: 3697 - DNA, 300 bp, Gossypium hirsutum
  unsure (1)..(300): unsure at all n locations; Clone ID: LIB3493-019-P1-M1-H12
cggacgcgtgggtatacactagtttctggtggtagtgataatcaccttgtgcttgtggatctaaggccattgggtattgatggggctcgggtggagaaaatacttgacatggcctctatcaccttgaacaaaaattcggtgcctggggataagagtgcacttgtgccgggtggcattcgcattggatcgcctgcaatgactaccagaggatntacagaaaaggaattcacggctattgctgatttcatccatgagggcgtgcaaatcactattgaggctaanggattagcttttggatca

SEQ ID NO: 3698 - DNA, 383 bp, Gossypium hirsutum
  unsure (1)..(383): unsure at all n locations; Clone ID: LIB3493-019-P1-M1-H2
attaaaaagtgtgctgcggtgacagagcgtgttcttgctgcttgctacaaggctttgaatgatcaccatgtcatgctagaaggtactcttttgaagcctaacatggtgacccctggttccgactccccgaaggttgccccagaggttattgctgagtacactgtccgtgccttgcagcgtaccgtccctgctgcagtccctgctattgtgttcttgtctggtgggcaaagtgaggaggaggctacccttaaccttaatgccatgaacaagctccagaccaagaaaccatggtcactctcattctcatttggacgtgcccttcagcagagcactctcaaggcctgngctggaaaggaggaaaacgtgaagaaagcacaagatgc

SEQ ID NO: 3699 - DNA, 421 bp, Gossypium hirsutum
  Clone ID: LIB3493-019-P1-M1-H3
agcaaccataaacgtttgggaacccaaaatacaacagcctaacgagttcagcttatcccagttgtggattcttggaggttcttttggtgaagatcttaatagtattgaagctggttggcaggttagcccagatctctatggtgacaacaatacaagacttttcacctattggaccagtgatgcatatcaagctacaggctgctacaatctcctctgttctggtttcattcaaattaacagtgaaatagcaatgggggcaagcatatctcctgtttctgcttatcgaaattcccaatatgacatcagtatacttgtatggaaggatcctaaggaagggcattggtggatgcagtcggtaatgactatgtgttgggtatgggccttccttcttatctcctacttggcggcagtgcttgatgat

SEQ ID NO: 3700 - DNA, 376 bp, Gossypium hirsutum
  Clone ID: LIB3493-019-P1-M1-H4
tgacctcagaaagagtacccaaaagaaaaacgctgattaaggaaggatttctagggttcttttttccgtatcagtaagcgatggcaatggctgctctcagacgcgaagggaggcgtttcgcccctctgatctctccccgtccaattactgctgtccgatcctctcctatcgttcccactcacgaatatgagggtccgattggtgttcgtcatatttcaactcaagtcgttagaaaccggatgaagagtgttaagaatattcagaaaattacaaaggctatgaagatggttgctgcctcaaagttgagagcagttcaaactaaagctgagaattcccgaggcctctggcagcccattactgcacttttttgtgatct

SEQ ID NO: 3701 - DNA, 454 bp, Gossypium hirsutum
  Clone ID: LIB3493-019-P1-M1-H5
gtgaggctctacaccgaccagacaggatccaacatcaccgatagcctttccctttcgggggaattctttgattcaagactttccaatggtgttcgtctaaatcgtttatcaatgcaacacatcatcaaaaacgcagtcacttccaagccaagcccactgcctctcgatcctcgcagtggtctctatttggtgctgacttcatctgatgtccaggttgatgaattctgcagggcagtttgcggctttcattacttctccttcccatccattgttggtgccacggttccttatgcctggattggttacagtgggactcagtgtccaggcgtgtgtgcctatccatttgcccggcctttgggggcgccaccggcgagtgcgatgggaggaacgacatcatgcgcccaccgaatggagatgcccgagtcgaccggatgaatagtgttataagctcacg

SEQ ID NO: 3702 - DNA, 355 bp, Gossypium hirsutum
  Clone ID: LIB3493-019-P1-M1-H6
gccgattacaacatccagaaggaatctaccctccaccttgtcctccgtcttcgtgggggtatgcagatcttcgtcaaaaccttaaccggcaagaccatcaccctcgaagtcgagagctccgacaccatcgataatgtgaagtctaaaattcaagacaaggaaggcatcccaccagaccagcagcgtcttatcttcgccggaaaacagctcgaggacggccgtaccttggccgattacaacatccagaaggaatccaccctccaccttgtcttacgtcttcgtgggggtatgcagatcttcgtcaaaactttaaccggcaagaccatcacccctcaagtcgagagctctgacacca

SEQ ID NO: 3703 - DNA, 315 bp, Gossypium hirsutum
  unsure (1)..(315): unsure at all n locations; Clone ID: LIB3493-019-P1-M1-H7
taagaggggatatcananntgaaatacnncgcanngtcacgccatggtnntctggcnncacgtcgcagatttaggtagctaaataccatcaacgnnaaacttggaggacgttgaaaagaacgaggaaaactcgtgtcaagggcagtnngcagtgcttgaacgacattggtcatctgaacgctttactacatgttcgatgattgcgctgaaatacatgtctcgctttacgtgaccctgcaattttccgattttgtgctatccctcagatcatggctatcggaacactagccttgtgctacaacaacatcaaagtct

SEQ ID NO: 3704 - DNA, 312 bp, Gossypium hirsutum
  Clone ID: LIB3493-019-P1-M1-H8
caagtgttttaactcctcacaagcagaatcaatttatacccatttgttcaatttaattgaaatggaagataccaccattcaacctcttctcaccccctacaaacttggcaaattcaatctttctcatagaattgtattggctccattgactagacaaagatcttacaataacgttcctcaaccacatgccattttatactattcccagagagcttccaaaggaggtcttttgctggctgaagctactggagtttctgatacagctcaagggtatccagatgtacctggtatatggacgaaagagcaagttga

SEQ ID NO: 3705 - DNA, 240 bp, Gossypium hirsutum
  Clone ID: LIB3493-019-P1-M1-H9
cggagtttcggcctagacctacgcgtcacggtgagatgggaagagacacgctgcgcttatgcgtgctgatgatctcgattatgttaagatgaggttcagttgatactacggagtgttcgtcttcatcctctcctacgacagcaaagcaggctaagttctttatgtggtctatgatgaagttattgacaagcattagatcgcgaacgtcgacgcattcattataacccggagttgctacga

SEQ ID NO: 3706 - DNA, 472 bp, Gossypium hirsutum
  Clone ID: LIB3493-020-P1-M1-A1
tgcgtcaataaattttgtaatgatgtgggaaaggatttttgtattgtgaaattgtaaactactacttctttctttaacatgcttaaatttgtgctataaaacaactctccttcgcttttattattattttttctgtaataagaaagcacgaagcaaaaaagtgaagaggggatttgaggaagtgaaatatatttatttatgtgggttttttggttggatttttaagctgggttttgcttgaatttttaattaagatagtgaaagaataatggagagagattttctgggtttgaattcaaatgaaccattggctgtggttaaggatgatgttaacactgataagtacaaacaaataggttttactaaaagctcagggatacaatggcccttttcaaacaaagttttcgctgttccacagctgatgaactttaattttgcccaaggggataaaaccaaaaagactggttatgat

SEQ ID NO: 3707 - DNA, 261 bp, Gossypium hirsutum
  unsure (1)..(261): unsure at all n locations; Clone ID: LIB3493-020-P1-M1-A10
tttcgctatctgccttttccctttctctctatctgattcctatcgacaatggccgccgccgccacttcttcaccccgcgaggaaaatgtctacatggcgaaactcgccgagcaagccgaacgctacgaggaaatggttgagttcatggagaaagtctctgcctccgccgacaacgaggagctcaccgtcgaggaaaggaacctcctctccgtcgcttacaagaatgttatcggcgctcgccgtgcttnctggcgcatcatt

SEQ ID NO: 3708 - DNA, 253 bp, Gossypium hirsutum
  Clone ID: LIB3493-020-P1-M1-A11
gtcccatgaaaacatcaccgtcatcacctcccccaaaggcaacaactcggaagcagcagcatcggcggcagccaactcgccgaaaggaggccaatgtttgtgctcaccgacgactcaccaaggctctttccggtgcagatttcacagatcaagctcatcatcttggatgatgaaacgatcaaaatccatgcctaccaacaatactttcatggtttctctttcttccaagtcaagtgaaacttcataaaatccc

SEQ ID NO: 3709 - DNA, 291 bp, Gossypium hirsutum
  Clone ID: LIB3493-020-P1-M1-A12
ttttaaaagactttcactatgtatctactggttggttttgatatatgcatctgtcttgaggttctacaacatttctaagaatagtaagattgagaggattcttcttcggaagtactaccatctgctggctgttctaatgtttttgcccgctctgatttaccagccaaaatttcttgatctagcatttggtgctgctttggctgttttcttggtattagagatcattcgagtttggagaatttggcctttagggcaacttgtacatcaatttatgagtgcctttactgatca

SEQ ID NO: 3710 - DNA, 350 bp, Gossypium hirsutum
  unsure (1)..(350): unsure at all n locations; Clone ID: LIB3493-020-P1-M1-A2
ataccctgaccggatgatgctaacgttctcggtgtttccatcacctaaagtatcggatactgtggttgaaccctataatgcgaccctgtcagtgcaccagcttgtggaaaatgctgatgaatgcatggtccttgacaatgaagctctttatgatatctgcttcagaactcttaagctcacaaatcccagctttggtgacttgaaccatttgatttcaacaaccatgagtggagtcacatgctgccttcgcttncctggccaactcaattccgatcttcgaaaactagcagtaaacttgatcccattcccacgcctncattttttcatggttggttttgcacctttaacat

SEQ ID NO: 3711 - DNA, 419 bp, Gossypium hirsutum
  Clone ID: LIB3493-020-P1-M1-A3
ggaacagcaatcccatggttctatatatggtgattcaggggtaggttattctactaagcaatcagctgaggaaacagagatgcaaatgcttgcatcagcaggtgatcccatgttgccataaagtaactgaagggaaaacctgttacagtgatatatggatatttctgcttgttttaaagtaggcaatcctccaagatcttcagttcttgtgcagtggctgccatctgatttatggaaccactttgttaagtgtacagaagtatttaaagaaaaatctaaaaacccagttcctagttgactggtagaacaagctgagacccttttttttcagccaaataggctgtgtattagaagttagatcagggttctgaacttgctgatgcactggcactggctgcccaggttggctttagtaaaat

SEQ ID NO: 3712 - DNA, 361 bp, Gossypium hirsutum
  Clone ID: LIB3493-020-P1-M1-A4
aatagtttctagacttagatggataccattgatagagaaatccaagctccaaattcaggtcgcaaacatggcggctgggtcaccttccctttcattaccggtgcagtgttaggcttaggacttgctggtacaggatggatggccaacctcattatctatttgattcaacaattcaatgtaaacgccattgatgctgctcaggtttccaatatcgttaatggcggctcaagtttgtttcccatagttggagctatcattgctgattctttcttgggctgtttctcagtcatctcattattttcatccatttctttacttgggaacaagttttattgccttaacagctacactcaactcactg

SEQ ID NO: 3713 - DNA, 383 bp, Gossypium hirsutum
  Clone ID: LIB3493-020-P1-M1-A5
acaaaacttactggtagacagaaaaaattattcgagttgagactaaagatgaacgaggcaagaaaagctaatcaaacggctatggtggctgaaaagaaacgaatggaagctccaccagaatctagaggaatttctaagcaaaaatggctcgaggaaaggaagaaaaagattgggaaacttttggatgcaaatgggttggatttgcaaaaagcgtatatgctcgatactcaagaggcagccgaggcaaaatataagaaatgggaaaaggatcctgctccgttcggttgggatgtattcaatcagaagacattgtacaatgcatacaaaaaacggacaaagaacatcgacatcgacttagaagaatataacaaaatgaaagaatc

SEQ ID NO: 3714 - DNA, 186 bp, Gossypium hirsutum
  Clone ID: LIB3493-020-P1-M1-A6
cgcgtccgcagccgccggtacatttgaccaccaccaccgacacctttgtgtgagcaacctccactctctttttgaaggaaattaactgaaatggctggaggattaatccaccaggttttaaggaggaaatttcaatcacagtctgctgttcaagctttatcatggttttcatcaaggaaagttaat

SEQ ID NO: 3715 - DNA, 216 bp, Gossypium hirsutum
  Clone ID: LIB3493-020-P1-M1-A7
tcgatgacgtttgtgctgacgtggtaggggttttcattacctggaaattgtaaaatactacttctttctttaacatgcacccttttaaggcaccaacttggggatctatcgctttattatattgtctttgcatagaaagccgaagcaaaaatgaaaggggttgaggaataaattttattattggttttggtgattaagtgggtgctgattttattt

SEQ ID NO: 3716 - DNA, 276 bp, Gossypium hirsutum
  Clone ID: LIB3493-020-P1-M1-A9
ctgaaggtgttgaaccagggcccaaacctgtaataatatccgaggcgcttgccaagtttttgggtactggaggaagagaaatgctagcaaccgaggcagaaaatcgtgtttgggagtacataaaggttaatcgtttggaggatccgtcgaattcaatggtggtactgtgtgatgccaatattcgtgaacttcttggatgctaaagcatatcggtgattggcgtacgggagacgcttctacgacatcatttatttaagcagacttaaaatctctgat

SEQ ID NO: 3717 - DNA, 469 bp, Gossypium hirsutum
  Clone ID: LIB3493-020-P1-M1-B1
gcgatctggtaaggagcttgagaaggaacccaagttcttgaagaatggtgatgctggtatgattaagatgattcccaccaagcccatggttgtggagaccttttctgagtacccacccttgggccgttttgctgtgagggacatgcgtcagaccgtggcagttggtgttataaagaatgttgagaagaaggacccatccggtgccaaggtcaccaagtctgctgctaagaagaagtgaaccgtgctggttaaatctaatgaagtttccgcagatggagtattttattatcataataatagtttgatagactttatcatttatgatatagttggtcttttgcttggttttgcatgttatagtgtgttgccattgttgtctggtaactgttctcagtattgggtgcttgacagacggtggcatatctatgggtggtctctaacgttacctgggtttgtttaatttactact

SEQ ID NO: 3718 - DNA, 419 bp, Gossypium hirsutum
  Clone ID: LIB3493-020-P1-M1-B10
ttacaaagctggtgatgaagttcctctttatgctaataaagtaggtccttatcacaatcccagtgagacctaccgttacttcgattttccgttctgttcctcagctcccgtgaaggagaagaaggaagctttgggtgaagtattgaatggcgatcgactagtgagtgcgccttataaacttgagtttttgacggagaaagaggctgaaattgcttgtaaaaggaagcttacgagggatgaagtggtcaagttcagaaaagctgtctcgaaagactattacttccagatgtactacgatgaccttcccatttgggggttcttggggaaagttgaaaaggaagggaagaccgatccagctgattacaaatattaccctcttaagcatctcgtttttgagatccatcataacaaggatcgcg

SEQ ID NO: 3719 - DNA, 348 bp, Gossypium hirsutum
  Clone ID: LIB3493-020-P1-M1-B11
ggaaataacaacaacccaacatgagcttcacactcgtatgtttggttctcagtttgtacttatgttttttttcatatgttcatagcttagacagcttttccaatggttccttggatacatttcttcaggattttgctttcagagcattggttattaggcacagacctcatactggagctttatacaaagccaatcttccggtttatctttcaggcatgggcgtttccattgcacgaatccgaagccggacgttgtggaagaaaggggctaattttagttgttttcgtatcccatcacggacttttctggttcctcacgtccgaagggtcgcgatagtctacgagaccc

SEQ ID NO: 3720 - DNA, 308 bp, Gossypium hirsutum
  Clone ID: LIB3493-020-P1-M1-B12
ccggaactgggaagacagcaactttctgctctggaattctacaacaacttgattatgctatggtccaatgccaggctctggttttggcacccactagggagttggcacaacagattgagaaagtgatgcgggcacttggtgattaccttggtgttaaggtccacgcttgtgttggtgggacaagtgttcgtgaggaccagcgcattcttcaaagtggtgttcatgttgttgttggaactcctggtcgtgtctttgacatgttgaggaggcagtcacttccgccagattatattaaagatgttggtttg

SEQ ID NO: 3721 - DNA, 427 bp, Gossypium hirsutum
  Clone ID: LIB3493-020-P1-M1-B2
agtatgcaaaggatgttcaagatcttatccagtttggaacttctggcaacgttgctggattcatttctgaagctatacaaggagttggtggaatcatagaattggccccaggttacttgcctgctgtttatagcaccataaagaaagctggaggtctttgcattgctgatgaggttcaggctgggtttgctcgcacagggagccatttctggggatttgagaaccatggggttgttcctgacatagtgacaatggcaaagggcattggaaatggcattcctctaggtgcggtggtaactacccctgagattgcggaggtcttgactcgcaggagttacttcaataccttcggcgggaaccctgtatgtacctctggagggctagccgtccctgaaagtatcgaaaaagaaaaatttcaggagaatgc

SEQ ID NO: 3722 - DNA, 371 bp, Gossypium hirsutum
  unsure (1)..(371): unsure at all n locations; Clone ID: LIB3493-020-P1-M1-B3
aggtttgtttttttggaatcattgccagtgtctgccagtggaaaagtagactatgcacagttgacagactcaatattctgcatcagtcatgttaaagatgagataggtgacattggggctagcaatctcatgcaaattataaaaaaggctatttgtgacgctntaatggtggaagatgtntcagatgatgatgatttctttatgataggtggtaactccatcactgcagcacatgtttctcataatcttgggattgatatgagaatgctgtataccttttcaactccagctaagctcgtaatttccctcctagagaaanatgtattaaataataacaaattttgagtcaatgatatcccagaatcaacaat

SEQ ID NO: 3723 - DNA, 351 bp, Gossypium hirsutum
  Clone ID: LIB3493-020-P1-M1-B4
gcggtcctgaaattgttcggatctttttttagcccgtacggttacagagtaatttgggctctgaaactcaaaggcataccttacgaatatattgacgaagatctccgcaacaagagtcctttgcttcttcaatataatccaattcataagcaagtcccggtgctcgttcatgacggaaaaccgatctgtgaatccaccgtcatccttcaatatatcgatgaaatttggccgcagaatctcttgctgccggctgatccctatgacagagtgttgctctgttttggatcaaatttgcagatgaccagggttatttaatgttaaagctttatcgagccaatggcgaagaacaac

SEQ ID NO: 3724 - DNA, 286 bp, Gossypium hirsutum
  unsure (1)..(286): unsure at all n locations; Clone ID: LIB3493-020-P1-M1-B5
atttcgtttcatttttttggtttctcttcaatttaaaattttctttgctagacacaaaaagcgatctagcttgaaaagttctattttttttaaagattttgtttgttttagggtttaggtgatggcttcaaagcggatcttgaaggagctcaaggatctccagaaagatcctcctacctcttgcagcgcangccctgttgctgaagacatgtttcattggcaagcaactattatgggtcctcctgacagtccttatgctggtgagtgtttctagtcaccattcatt

SEQ ID NO: 3725 - DNA, 313 bp, Gossypium hirsutum
  Clone ID: LIB3493-020-P1-M1-B6
acgcggacgcgtgggcttcccctgacgctttctccatgcgaacttaggaaagtaaagcagcaacatgaaccaaaaaacattgctagaccgatcggacgcctcctggttcattgcgtttccgttttccaaacccgacggtagagatgcaaagaccaaatctttacgctggtccaaggtcagttcagaatcgtcatcatctccgaccaactatcccgatttttcagctctccctttcgacatattaacgaaaatcgcggcgccgtttaatttcccgaatcttttagcggcgtttctggtgtgtaggtcgtggggg

SEQ ID NO: 3726 - DNA, 235 bp, Gossypium hirsutum
  Clone ID: LIB3493-020-P1-M1-B7
ctcacacttcaccttgaaaaagtcaaatttcccagaaaataaaaaactttccagcaaaatgtcaggaagaggaaaaggaggtaaaggtctcggaaaaggaggagccaagaggcatctgaaggtcctaagggataacatccaaggtatcactaagccggccatccgtcgtttggctcgtcgtggaagagtaaagagaatcagtggcttgatctatgaaaaaaccagaggagtgttg

SEQ ID NO: 3727 - DNA, 279 bp, Gossypium hirsutum
  Clone ID: LIB3493-020-P1-M1-B8
tgactatcctatacttcaaggtcataggattgaacactcgcatggaaactggttgatgcctccccccacttcatctcatcatgaaagcaatccagtccaatcaagagatttaatgcccaaaacatcatttgtacaagggcatgagaatggaaaatatagagaaggaaattgtaaactctttggtattcctctcattaggaattctgttgcatcagagccgacagtctctcgtatgcaagctgcatcccgccaagttcttgaatttgagtctgctcaaaa

SEQ ID NO: 3728 - DNA, 343 bp, Gossypium hirsutum
  Clone ID: LIB3493-020-P1-M1-B9
cggacgcgtgggcgcagagggtgcaaagtcagctggtgcttcaagaataattggcgttgatattgatagcaaaaagtttgatgtagcaaagaattttggagttacagagtttgtgaatccaaaggactatgataagccaattcagcaggtccttgttgatctcacagatggtggtgttgattacagtttcgagtgtatcggaaatgtctctgtcatgaggtctgctttggaatgctgtcacaagggctggggaacatcagttatcataggtgttgccgcatcaggtcaggagatatctacacgacctttccaattggtgactggccgtgtttggaaagggaca

SEQ ID NO: 3729 - DNA, 393 bp, Gossypium hirsutum
  Clone ID: LIB3493-020-P1-M1-C1
gggccttttcctgttcacaaatgcgattggaaatgccaaaatgaacatgtttgtggcaacatgtatcgctgcaaactaacaggaaccacacatatctgtgacaagaactgtaaccagagaattttgtatgataaccatagttccctttgccgggcaagcggccaggtctttccgctttctcaagctgaggaacaggtgatcagaggcgtcaggaggaagcttgatgctgacaatttcccaccctctgatagctgtggttttaagcgcagacgtgatgtgcagattcgtccttctccttttgagagatctttctctgctgttagtcccatctgcagccaagttggagatggcatggacttgagctagattagtttcgaatttagattacatata

SEQ ID NO: 3730 - DNA, 348 bp, Gossypium hirsutum
  Clone ID: LIB3493-020-P1-M1-C10
gaaaccggtgtcttgaagcctggtatggttgtgacctttggcccgtctggtctgacaactgaagttaagtcagttgagatgcaccatgaagctcttacagaagcacttcccggtgataatgttgggttcaatgttaaaaacgttgctgttaaggatctcaagcgtggttttgttgcatccaactccaaggatgaccctgctaaggaggctgccaacttcacttctcaggtcatcattatgaaccaccctggacaaattggaaatggatatgccccagtccttgactgccacacgtcacacattgctgttaagtttgctgagcttttgaccaagattgacaggcgatct

SEQ ID NO: 3731 - DNA, 398 bp, Gossypium hirsutum
  Clone ID: LIB3493-020-P1-M1-C11
ggcaggcagccatggcaaggatcaaggtgcacgagttaaggagcaaatcaaagacagagctgttgactcagctcaaggatttaaaagccgaactttctctccttcgtgttgccaaggtcactggtggtgcccccaataagctctccaagattaaggtggtgaggctatccattgctcaagtattgacggtgatatcccaaaaacagaaggctgctttgagggaagcttatacgaagaagaagtttttgcctcttgatctccgtcccaagaagaccagagctattcgccgccgccttaccaagcaccagcaatctttgaaaaccgagcgggagaaaaagaaggagatgtactttccgatgaggaagtatgccattaaggtataagctttgaaatttgac

SEQ ID NO: 3732 - DNA, 416 bp, Gossypium hirsutum
  Clone ID: LIB3493-020-P1-M1-C12
ccaaaacgaaactcatcccaagggttaggagttacaagtgatggaaccggtcaagatgccaacaactccttgtggagtaataatcataatgaaaggaacgaaggttctgaaactagagctgaaaatcatagtgaagtcaggttgtctgtgcttccggcttatcaagtcaaagctctggcaccttacgaacatgttaccaccggtggagcttctgaaaattccgctggtcttagtggggaatgtgaagaagcaagcaaggagggagcagatgttgaatctaaaagtaaaagaaggaaaaatgagaatcaatcaagtgaagtgggcaccttaggggaatgcatacaagaacctcgtgtggtagtgcaaagttgtactgattcttagattatgggggacgggtttcgatggagaaaata

SEQ ID NO: 3733 - DNA, 431 bp, Gossypium hirsutum
  Clone ID: LIB3493-020-P1-M1-C2
cggacgcgtgggctgctgaaatgaacaaaaggtcattcaagtatgcttgggtgcttgacaagcttaaggctgagcgtgaacgtggtatcaccattgatattgccctgtggaagtttgagaccaccaaatactattgcaccgttattgatgcacctggacaccgtgactttatcaagaacatgattaccggtacctcacaggctgactgtgctgttctcattattgactcgaccactggtggttttgaagctggtatctctaaagatggtcagactcgtgagcatgctttgcttgcttttacccctggtgttaggcagatgatttgctgctgcaacaagatggatgcaacaaccccaaagtactcaaaaggcaaggtttgatgaaattgtaaaaggagtctcttcttatcttaaaaaaaagtggttacaacc

SEQ ID NO: 3734 - DNA, 379 bp, Gossypium hirsutum
  unsure (1)..(379): unsure at all n locations; Clone ID: LIB3493-020-P1-M1-C3
ctcaattcactaaagacttgtcagtacctgcagagacacgggtcaaagccattaatgagatatgtggccaagctaaattttcagatcttacaaagaactttttggttatactagctgagaatggaaggctaagacatatagaaagcattgcgaagagatttgtggagttgaccatggctcataagggagaagtgaaagctattgtcacaagtgttattccccttcctcctcaggaggagaaggaactaaaggagaccctgcaggaaataattggacaggggaagcaggttaagctggaacaagaagatgatnctagtatttcttggtgggtttgtcgtagagtttgagccaaaagtatttgacatgtccattaagacta

SEQ ID NO: 3735 - DNA, 287 bp, Gossypium hirsutum
  Clone ID: LIB3493-020-P1-M1-C4
aggtaaaaaaaaacgataattaggaatagaagttttatcttttgatattatcgtagattttcacgataataatggtgtggttctagtccttgctatggcggagatctgttacggagttgtgagcgaaggcgaagcatcaataccgcgcgagccgagttcacgtgcagcaaggaggcgtaggatggagattagacgaattaaaatccgcgacgtggctccatctgaagctgggaatggccggaaacgccagaacctggcaggttaccgagcatcattttctctggact

SEQ ID NO: 3736 - DNA, 460 bp, Gossypium hirsutum
  unsure (1)..(460): unsure at all n locations; Clone ID: LIB3493-020-P1-M1-C6
gtttctcctctacgtaatccatggaagcctgcttcttcgatactctcaaggctcaacctttctgggttattttccttttcactttgggttctttatcactcttgaagttttcatttgtttttctgaaatgggtctggatcaattttcttagacctggtaagaatctcaaaaaatatggttcctggggtcttgttactggaccaactgatggtatcggcaaaggatttgcctttcagctggctaggaaaggccttaatcttgtcttggtgggccgtaatcctgataaactgaaagacgtttccgattcaatcttggccaagtatgccaagattcagatcaggacagttgttgtggacttcactggcgatcttgatgnaagcgtgaagaagataaaagaaactattgaaggacttggtttttgtggggtttgattaacaatgtgggatttcatatccttatg

SEQ ID NO: 3737 - DNA, 238 bp, Gossypium hirsutum
  Clone ID: LIB3493-020-P1-M1-C8
ctcggttacagcattgaagacgtgcggccaaacggtggaatcaagaagttcagatctgctgcttactccaactgcgctcgcaagccatcctgatatactcacaagcggcatctgaccactagtagtggttaataaaactgttatttgctttgttagttagttttagattatttccccgaccaactcttctctcttcgtggctggtttctttacattgcgttctcctgatttggcgact

SEQ ID NO: 3738 - DNA, 292 bp, Gossypium hirsutum
  Clone ID: LIB3493-020-P1-M1-C9
ctttgataaggatatttgggaattagggtttttaattggagttcaatttgtgtaattatattgaccaaaggaatagcctttgataaggataactgggaattagggtttttgatttgtgttcaatttgtgtaatttaattgaccaaaggaatagcctttgataaagatagactttaaaggcttcaacttgatataaccttttttttttcttatactcaatgttttgtagattttatcggctttttttctagacaattttttgtcttttacagaaaaaacccttaaattttttt

SEQ ID NO: 3739 - DNA, 317 bp, Gossypium hirsutum
  Clone ID: LIB3493-020-P1-M1-D1
ctccgacgaaagaaaccagagaaaaatgaccaagtgttacccaaccgttagcgaggagtaccaaaacgccgttcaaaaggctaagaggaagctaagaggtctcatcgctgagaagaactgtgctccactcatgctccgtctagcgtggcactcagctggaacttttgatgtcaagaccaagaccggaggtccattcggaaccatgaagcaacctgctgagctcgctcatgctgctaacaacggtctcgatattgcagtcaggcttctcgagccgatcaaggagcagttccctatcctttcatacgctgacttctatc

SEQ ID NO: 3740 - DNA, 373 bp, Gossypium hirsutum
  Clone ID: LIB3493-020-P1-M1-D10
cggacgcgtgggtttggatgctgaaattatttctgggttagtttcctattgcgagttggctcatcctcttgacgccaaagaatatcttgacaatattattggacaagaagcaggaaaagttgttaccgaagagtacttgcggcggagaggtcacttagatctctgcaccggcaatgcagccatccctgcttcgaaacttcaagcctatgtcaaaccaccttcgggtgaaatctctgtcagtggaacgaagaaaccatttaagactccaaaagaggctgcgggctctagttatcgggctgaaccaaaaaagaatgtcatttctggtaatcaggaaaacagaatcccgaatgatgctagtgattcaagaaacatg

SEQ ID NO: 3741 - DNA, 345 bp, Gossypium hirsutum
  Clone ID: LIB3493-020-P1-M1-D11
agaaaagttcccaaaaactccgatcgacgatgtccggtatggaacgattgcacaggatgttcgccggtgctggtggcgcgttgggtcacccaccgccggattcgccgactctcgattcgtcggagcaggtctacatctcctctttggccctcctcaaaatgctcaagcacggaagagctggagttcccatggaagttatgggtttgatgttgggagagttttttgatgagtacaccgtacgtgttgtggatgtctttgcgatgccacagagtggtactggtgtcagtgttgaagctgtggatcatgtttttcaaacaaatatgcttgatatgctcaaacaaactg

SEQ ID NO: 3742 - DNA, 387 bp, Gossypium hirsutum
  Clone ID: LIB3493-020-P1-M1-D12
caaagatggcaggcgcagcaaattgggtttccataaccttactgttttcagtatgtttatcggcgtcctatggtaagaggaccggaatctccaccatggctgacggagccgatgggtttcaaccaagcaacggttttccgcatgaagctgatcctgattcttcaacctctatcgatcctgatcctaccggattcggtgctgggataggtataggttatgaaagaagcccttactgtatcgactgcgacgatgtggatatcatgggcggcagcttttgcggcgcctgcaattacggatgcccttaccgcaggttcaataatgggtgtggtggtggtattgcttatatggatgaactcaaacgaacgattaaggaccttaccatgaaac

SEQ ID NO: 3743 - DNA, 413 bp, Gossypium hirsutum
  unsure (1)..(413): unsure at all n locations; Clone ID: LIB3493-020-P1-M1-D2
ccgactctggtgttgcattttagaggagctgacttgtcattgccggcgaccaactatttgatcccggtagatagcagcgggactttttgctttgctttcgcgggtacaatgaacgggttgtccatcattggaaatatccagcaacaaggtttccgggttgcatatgatttagcgggttctcgtgtcgggttttctccccgtggatgcgcctaaaaatggtggtgcttttaatttttatattaagggacaaagctttatccctatctctatattattttccttggatattcatggtgagggaagaaaggagaaacataatgtttcatagatagaatgtaggggaagttgtgatcacaaggcggttgtggntaaggagagatgcgtcgcggtatcagttacggtgccgtgacttg

SEQ ID NO: 3744 - DNA, 350 bp, Gossypium hirsutum
  Clone ID: LIB3493-020-P1-M1-D3
tttatttcttccttgagcatagatggtagtgtagctaagttagatggtgtgggggtttccttccatttcactggagggtctcgttctttggatcaaggtccccgacacaagaagaagtgctctggtaggggtgaagatgggagtgtcaaatgtggaagtagtggtaaatgccattgctccaaaaagaggaaacatagagtgaagagatcaatcaaggtgcctgcaattagtaacaagctagctgatattcctcctgatgattattcatggaggaagtatggacagaagccaatcaagggttctcctcaccctaggggatattataaatgtagcagtatgagaggttgccc

SEQ ID NO: 3745 - DNA, 277 bp, Gossypium hirsutum
  Clone ID: LIB3493-020-P1-M1-D4
gtcgattaaatgctggttgtggtacagagattggtcctttgagatgttggcctggatgcttgtgtttttcacgatctatttgctattgggctgtatggtttgctatcttcgttttctagtttttttttttttttatttttgttttttcttttgttttttcttcttttttataatatttttttccgttatttttttttctttcttcgtgttttgttatttttttattttatttgttgtgatcgtcatttcttttttggttgtttttttttttttatct

SEQ ID NO: 3746 - DNA, 353 bp, Gossypium hirsutum
  Clone ID: LIB3493-020-P1-M1-D5
gcctaactcaactcaaatatgtccgtacttcatcctttagaacaacacccctatcttgtaatgaggttaaagttttctgtctctttcctttaatggcgtttcttccattgaaaggactctttttctctttacactcacacttgtccccatcatatattgaagttttgtcaatattttaactcaactctgtcctatataatgacttcttctcctgagtacaataacatgcaaaaaacagttgcattgctgctaatagtttgtcttgattcttattctcagttgtgatttaggtttgatattcaaatggcggatattagcaatggttcccaagggtttgcagcgaaacaaggaga

SEQ ID NO: 3747 - DNA, 430 bp, Gossypium hirsutum
  unsure (1)..(430): unsure at all n locations; Clone ID: LIB3493-020-P1-M1-D6
cccacgcgtccgttccccgcctgtatcccaagatcaaccacggctggtgtgaaggcagcaactaaactaactttcccttcatctggacaggagcctaagattacagctgcaggatcttgcagtgtatcgattaaattctcggcagcagcttttagtgaatcagcatccacatcatccaatgactcaactagcaccctggagttaaatgttcagaagccaaagaacaaaagtcagaaatgagttccattaaatagcaaaatttgatatctttgaaacaatattacacattaccttatcgtttgtgaagttcctccttcaaatgccttgtttgcaatcattagtgctttatattcggctgcttttgtacgcanattagcaacttcagttcttgacattcttaactccttttagagtttttctacccctgtag

SEQ ID NO: 3748 - DNA, 396 bp, Gossypium hirsutum
  Clone ID: LIB3493-020-P1-M1-D7
attttagacaaatcaaatcgccaggttgaagtacgaagagactgcccttaccttgatactgttaaccgccaggtgctagattttgattttgagaggttttgttcggtctctttgtcaaatttgaatgtgtatgcatgtctggtatgtgggaagtattaccaaggaagagggaagaagtcccatgcttatactcatagtctcgaagcaggacatcatgtctatatcaatcttcgaaccgagaaggtgtattgtctccctgatggatatgaaattaatgacccgtcattagatgatatacgatatgttctaaacccaaggttttccagagaacaagttgaacaacttgacaagaacaagcaatggtctagagcacttgacgggtcaaattacctttca

SEQ ID NO: 3749 - DNA, 334 bp, Gossypium hirsutum
  Clone ID: LIB3493-020-P1-M1-D8
catattgcgaggcatttttcatgcaaaagggattgctgttcctgatcctgtccaggctgcttgtacccggtggggaaaggatcgcttcacgtatggatcctactctcatgtcgctattggttcatccggggatgattatgatattctagctgagagtgttggagataggagagtcttctttgctggtgaggcaactaataagcagtatcctgccacaatgcatggagcctttttaagtggcatgagaaaggccgctaacatgcttagagtggccatgaggaggtcattggttctatctgacaaagtttataacgacttggagaaatgtgatact

SEQ ID NO: 3750 - DNA, 439 bp, Gossypium hirsutum
  Clone ID: LIB3493-020-P1-M1-D9
gaagattcttgtgtttgatgaagctgatcacatgctggctgaggatggttttaaagatgactccttgagaataatgagggatattgaaaagatgagttctcactgccaggttcttctgttttctgccacatttagcgacactgtgaagaattttgtctcaaagatagtcaagagagatcacaatcaactttttgttaagaaggaagaactatctttggagtctgtgaagcaatacaaggtgaatgttccagatgaactttccaaagttatggtgattaaagatagaattttagaatttggagagcgcctagggcagactattatatttgtacgcacaaggaatagcgcaagcatgttgcataaagcacttgttgagtttggttatgatgttaccacaattcaaggtgctctcaatcaagctgaacgagacaagatagtt

SEQ ID NO: 3751 - DNA, 415 bp, Gossypium hirsutum
  unsure (1)..(415): unsure at all n locations; Clone ID: LIB3493-020-P1-M1-E1
cggaatgtaaaacccgttcctaaaccagagcagcagttgcctgaaagacatcctgtgaatacatcgctgctactattccagggcttccctgaaaaataaggctcctgatgaggagggtcctaggttgttaatgccattacagtttcctacttcatgaatgtggtaataatgtatactactatggccttgcattggggtttgtaggaaaatccaccttcccatctgttcataacccatacagaacttagcaattaacttctcatttgtttttttttttgtttcttttttttttcgagtgcatagacatagtncgcggctgtttgtatataaaagagaatgaaagccggcttacttcggaatatcgacaagaaatttgcaaaccaaatgcttttgatctggtgaaattccttttttt

SEQ ID NO: 3752 - DNA, 467 bp, Gossypium hirsutum
  Clone ID: LIB3493-020-P1-M1-E10
cttgcccacactcacggcaaaacttcattcagtcaaagagaagtacttggctgccacacctccggtgccttcgaatatcaaggacaagtgggacttttcatttgcttcgatttggaataccattgtgtggcttatgcttatgaacttctttgtcaagattgttaatgcgactgctcagaggtatctgaaaaagcaacaggataagtcacttgcggaaatattacctgattcaacacattcagattcgtaattcgacgaaagcactcatcatcctttttcgtctttcttatttacaagtagcgttattgaattagaagtgaattctccttcatgaattaccattaaagctatccactataagaagcttgtatatatataaaagaaaaaattgaaaaaaaaaaaaaaaacccttgacaaacagaaacatggtttagttataattgtttcgggcttttttttacccattg

SEQ ID NO: 3753 - DNA, 339 bp, Gossypium hirsutum
  Clone ID: LIB3493-020-P1-M1-E11
gctctgtatagattcttctagttccgaccaaaaaaacaattgctcatctttccttcagagaatattgttttgagtgaaaaaaaaaatgttgggagtattcagcggagcgatagtgtccccgccggacgagctggtggcggccggttgcaggacgccgtcgcctaagataacggcggacgctcttgtgaaacggttcatcgaggcaaacccctccaccgtgtccttgcagatcggagatcatgtccaattcgcgtattctcaccgtaacgagtctgctttacttcccaggtcattcgcggtgaaagatgaaatattctgcatgtttgagggggcacttga

SEQ ID NO: 3754 - DNA, 356 bp, Gossypium hirsutum
  Clone ID: LIB3493-020-P1-M1-E12
cggacgcgtgggtttcagagtagaagcttcactaagcttactccctccctccttccctctctctgtttctgtcgcttccatgactgtcttgtttaaaatgcctgtcgttttgggtttctttgtgggtcttatgatgctgggtttggttagctctgctgagtttcatgagctttttcaacctggttgggcaaacgatcatttcaactatgaaggagagcttcttaagctcaaacttgataatttttctggtgctgggtttgcatcaaaaagcaagtatttgtttggaaaagtatccatgcagattaaacttgtagagggtgactctgctgggactgtcactgcttactatatgtcat

SEQ ID NO: 3755 - DNA, 253 bp, Gossypium hirsutum
  Clone ID: LIB3493-020-P1-M1-E2
aaggaagtgagtgaagaaggacagggtcgtaaggactatgtggaccctccaccggcacctctgattgatatggctgaactcaagtcatggtctttttacagagccctcatagctgagttcatagccactctcctcttcctctatgtcactgttgctaccgtaattggtcaaaagaaacaacaagatgcatgtgatggtttggtctcttggtattgcatgggcttcggtggatgatctttatctgttactgact

SEQ ID NO: 3756 - DNA, 68 bp, Gossypium hirsutum
  Clone ID: LIB3493-020-P1-M1-E3
gtccggagaaatcttcaagtacagatgttgttcctgtccaacagaatgaacgaagctggtgggaaatg

SEQ ID NO: 3757 - DNA, 367 bp, Gossypium hirsutum
  unsure (1)..(367): unsure at all n locations; Clone ID: LIB3493-020-P1-M1-E4
gtagtcggtcacttggaatcgtgtgacgggaatgataattattgccgatgccataatagtggtaactttatctcatcttttattctttcaaatggcagtctattatattgcttagggatttcctttaaaatgagaatctaaccaccaatttcgtcttgaaagattactttcgtagtgtgaacatcctgttttatctgccttcgaagatagactaagggacatatcttctgcatattagatgaggatacaaagtggaatggtttaaacttgttttaaagaaattaaccgtacgagagaaagagagagagagagagagagagtnaaaggagtgtttagatatttgctatacttatgcttaatattcatg

SEQ ID NO: 3758 - DNA, 448 bp, Gossypium hirsutum
  unsure (1)..(448): unsure at all n locations; Clone ID: LIB3493-020-P1-M1-E5
aaaattgtttgatttcttctaattagtgaatcatatggccagcactgtggccctcaagcttgcatgtggtgtggtcttgtgcttggttgtgggtgcacccctggctgaaggggccataagttgtggccaagccatatcagccttggcaccctgcattccttacgtgagaaacaacggtgctggtggcgtgcctgcatcttgctgcaatgggatcagatctctcaacgaggctgcccaatcaactccagagcgccaatcagcttgcaactgcgtcaaagcattagctgccagcatttctggcatcaactatgaccttacgaacaaactcccaggcatgtgtggggtgcacagccctttcaagatcagccccagcactaactggcaaaagtgtcaagtgaagtangccatggaagctcgtcagcaaatgggaaaggaaataatgatatat

SEQ ID NO: 3759 - DNA, 393 bp, Gossypium hirsutum
  unsure (1)..(393): unsure at all n locations; Clone ID: LIB3493-020-P1-M1-E6
cggacgcgtccgcccacgcgtccgaacgaatgaaggccagagcattagattcaaccaccaggaatggtgatttcttggacgtgcttcttgatcaatgggaagaaaacagatcaattctcaatcgtgaagcaatcaagcctttgatccagaacttgttcattgctggaagtgagacatctgcaacaactacagagtgggcaatggcagagcttcttcgaaatccccaagttatgcaaaaggcanagaaggaactccttgaagtattggctcggaaagaactgtgaaagaatcagacatagatgaactccaatatcttccagctgttgtaaaaaaaaccctgcggcttcacccagcagcccctctccttttaccatataaagcaaggaatgatgt

SEQ ID NO: 3760 - DNA, 377 bp, Gossypium hirsutum
  Clone ID: LIB3493-020-P1-M1-E7
gcttttccaatagagttgggaagtctgtgccgggccttgtcctggcaatttagtcatttccttatccctttctatgatcaggtgcagccgaatgtaggacaatataaaataaataaaaagaacttgttatgatcagttatgataatagtataaatgataatatttgaggttaaattagctaaaaatgtggtttttaaaagatatttgagtgaataaatcgatttctggtatatttatcaaaacagtttaattttgaaaaagaggatatgaaaacgtaattattaacctaattattgatataacatcattttatatttatatattgcatacataaattattatttttttaaattaatgattgaagtaatcatcaatga

SEQ ID NO: 3761 - DNA, 405 bp, Gossypium hirsutum
  Clone ID: LIB3493-020-P1-M1-E8
tccagttagactctaagataaaagagatggcagtgaaccagatggcggcgttgaaggtggggttgtgtctattgggcttctgctattcggctacatagtgggtccacctctgtattggcatttcatggaaggatttagcctttagccacacttccaacacttacccaccttgcctttacgattgctcttctcagcctcttcttacaatccctgaagggcacctcaagtgtattttgttggtgacaatgttaagaaccttaaactagaactggcaaagggtgcaaagctgaagtgcagcagatgtggactaaagggtgctgcacttggctgttatgtgaagtcttgtcacaaaagctatcatttcccttgtgcaaaaaagattccaaaatgtcgatgggactatgt

SEQ ID NO: 3762 - DNA, 446 bp, Gossypium hirsutum
  Clone ID: LIB3493-020-P1-M1-E9
ctaaaacatgtccttgtctcctgtgcaaaagctgtatcagataatgatctattgacagcacagtggttaatggatgaattacgacggatggtgtcagtttctggtgagcccatccagaggttgggagcatacatgttggaagggcttgtggcacgactggcctcctcggggagctcgatctacaaggctttgagatgcaaagaaccggcaagtgctgaactattatcttacatgcatattctttatgaggtttgcccttacttcaagtttggttacatgtccgctaatggagctattgcggaagccatgaaggatgaagatagagttcatattatcgatttccaaataggtcagggcagtcagtggattactcttatataagcatttgcggctaggcctggtgggccgccttacattcgcattactgggatttatgatttcacatc

SEQ ID NO: 3763 - DNA, 332 bp, Gossypium hirsutum
  Clone ID: LIB3493-020-P1-M1-F1
gtggcgatggagatcatcatcacattttcattggtttacacagtgtatgcaaccgcagctgacccaaagaagggatcactcgggaccattgcacccgttgccatcggcttcattgttggtgccaacatcttggccgctggtccattctctggtggatccatgaacccagctcgctccttcggaccagcagtggctagtggcgacttcaacggcatatggatctactgggtgggaccactgatcggtggtggattggctggtctcatctatggaaatgtgttcatgaactctgaccatgcaccattgtccaatgacttttaaataagttattc

SEQ ID NO: 3764 - DNA, 389 bp, Gossypium hirsutum
  Clone ID: LIB3493-020-P1-M1-F10
caaactactctttcgaaccagctccaccatcacccccaaaaaacaaagcaaattgtagaagatggcaacacaagcacttgtatcatcgtctcttacctactcagtggagactgcaaggcagattcttggagctaaacgacaaattgggtcttcaaggaaaggatcctttgttgttaaggcagcttcgactccacccgttaagcaaggagctgatagacctttatggtttgcatctaaacaaagcctttcatacttggatggcagccttccaggtgattatggatttgaccccttgggactctcagaccctgaaggtccaggagggttcatcgagcctaaatggctagcctacggtgagatcatcaacgggcgttatgctatgttgggtg

SEQ ID NO: 3765 - DNA, 232 bp, Gossypium hirsutum
  Clone ID: LIB3493-020-P1-M1-F11
gacggtgaaaaagaattagaagttgaaaagcaggaattaaaggtgaaacagaaacaaccttctgggaaactttaatttttgtagttgagatctttccttggaacctaatgtctgttgaaaatttcccgatgtaataagccaaatttaacaatgtgttttttttgtggtggttgaggcattgatcctcatttcggactttccctgaatttaccttacaaattgctattgctct

SEQ ID NO: 3766 - DNA, 354 bp, Gossypium hirsutum
  Clone ID: LIB3493-020-P1-M1-F12
ctggaatctcatctcatcccttcagcctcaacagctgagtccaaggtgttttaccttaagatgaagggtgattatcacaggtatcttgctgagtttaagactggcgtcgagaggaaggaagcagctgaaagcactttgttggcttacaagtctgctcaggatattgctattgttgaacttgctcctactcacccaattagactcgggcttgctcttaacttctctgttttctactacgaaatcctcaactcacctgatcgtgcctgcaatcttgcaaaacaggcttttgatgatgcaatttcagagttggatactttgggtgaggaatcttacaaggatagtacattgatcatg

SEQ ID NO: 3767 - DNA, 418 bp, Gossypium hirsutum
  Clone ID: LIB3493-020-P1-M1-F2
cggacgcgtgggcaggtttccatggaagaaactgatggtcttaattatggtctggttttccttctttgccatctatctccttcgtgggaatcgctatggacagggtgtcataccactgaagccttgtggaataggatattggtctctctccttgcttcaagttcccctcgccatagcttttactgcatggatccttcgcaggaaagagtccattgcaggccaaggtcccaaatcaacagggggggttaacaagctaattttccccttaatggctctaatggctggggcccttgggttgagttttggaaatcggggtggcatgcttataagcccacttcttttttaaagttggagtaaaccccccaggtgacagcagcctacatgttcttttcatggtttcttctcatcccacgatgtc

SEQ ID NO: 3768 - DNA, 321 bp, Gossypium hirsutum
  Clone ID: LIB3493-020-P1-M1-F3
atcaccatgtcatgctagaaggtactcttttgaagcctaacatggtgacccctggttccgactccccgaaggttgccccagaggttattgctgagtacactgtccgtgccttgcagcgtaccgtccctgctgcagtccctgctattgtgttcttgtctggtgggcaaagtgaggaggaggctacccttaaccttaatgccatgaacaagctccagaccaagaaaccatggtcactctcattctcatttgacgtgcccttcagcagagcactctcaaggccttggctggaaaggaggaaaacgtgaagaaagcacaagatgc

SEQ ID NO: 3769 - DNA, 450 bp, Gossypium hirsutum
  Clone ID: LIB3493-020-P1-M1-F4
cggacgcgtgggttggaatccaacctagtgatgttgcaagattggttagtcaaacttttgctgagatgatgtttaaacatggatttgttcattgtgatccacatgctgctaatttattagttcggccgttaccgtctggcaaaaggagaattttcggcaagaaaaagccacagttgatattgttagaccatggtctttataaagaactcgacttctctactagattcagctatgcttctctttggacggtacgttgtccctctcccaaaaaatttggatatatttcttggatgcatttatagtttttatttacattactttgactttacattttcttaaagtacctttgctggaaatgtaacaccccttacccgagaccgtttccggagtcgagcacgaggcattacttagcttatcttaccaattcggagcataaaaactaggtttgaa

SEQ ID NO: 3770 - DNA, 393 bp, Gossypium hirsutum
  Clone ID: LIB3493-020-P1-M1-F5
cggacgcgtgggctaccctccttcattttttttctcaaccttcacctccggcaccgatccacctctagtccgacaccaccgatcaacctccggtcctccacggctccacccatttcccccatttcccgtttcccttcttccacaaatccctaatcccttgcccgactgccctccttcctttttttctcaaccttcacctccggcaccaatccacctccggtccggaaccgatccacctccggtcctccacggctccacccatttccagaattagagatccggtttatctgaaactccaaccaaggtttcaccagcaacaccaagagtggctactaaactaggcagggcactggtcaaaacagagccgggttcaccctctcccatgcaaggact

SEQ ID NO: 3771 - DNA, 420 bp, Gossypium hirsutum
  unsure (1)..(420): unsure at all n locations; Clone ID: LIB3493-020-P1-M1-F6
gtgaataagtgggtgcaccattagctccttctaagccagagccaaagcagcagagaagaggaaaggaagatagaaaaatgggcgcaacagccaccggcaaatctctccatttttgctcttcacaggaccccctttcatttctctccctaacaaagacaaaatcaaaagcagaaaccctaaacctcaacttcagattctccaaacccccattaacccccaattctcgtcgccttcgtctttccattagagcttcttcaccctcctccaccgccctcaatgacccgcctcttccctctctcaccaattccgatcttcaacttcgagttcgaatcctctctgaatcactcccctacattcagaaanttangggaaaaaccattgtcgtcaaatacggaggcgccgccatgaaatctgcggagc

SEQ ID NO: 3772 - DNA, 338 bp, Gossypium hirsutum
  Clone ID: LIB3493-020-P1-M1-F7
cagaaagaaaggatggatggcattgaatcaaaatgtaggagcaacagcattgaggaaaatctgaagttgtggaaggaaatgattgctggctctgaaaggggattgcaatgctgccttcgtgggaagttagatatgcaagacccaaataaatctcttagggatcccgtgtactaccgctgcaatccggttccccaccatcgaattggatccaagtacaaaatatacccaacttatgattttgcttgtccgtttgttgatgctgaagaaggtataacacatgcactccgatctagtgagtatcatgatcgcaatgctcaataccataggattcaagagga

SEQ ID NO: 3773 - DNA, 140 bp, Gossypium hirsutum
  Clone ID: LIB3493-020-P1-M1-F8
cagttgcgctgaaacaggcaacaactccggagtacaaggcggaccaggagcaagttctcagtaattgcgcgaagtttgcacagactctggctgtaaaaggatactaacttgtttctggtggaacagagaattatgttatt

SEQ ID NO: 3774 - DNA, 371 bp, Gossypium hirsutum
  Clone ID: LIB3493-020-P1-M1-G1
gatttatgtgggtggtggagataggtgcaagagcatgaaccattacttgtggagcttcttgtgtgcattgggtgaagcgcaatatttgaatcggactttggttatggatttgaaactttgtttatcttcaatttatacttcctcaaatcaggatgaggtagggaaggatttcaggttttactttgattttgagcatctgaaggaggccgcatcagttttggatcacgagcagttttggcaagactggaataaatggcaaaagaaagatggcttgagtcttcatcttgttgaggattttagggtgacgccaatgaagctttctgaggtaaaggattctttgattatgagaaagtttggattggggagcctga

SEQ ID NO: 3775 - DNA, 362 bp, Gossypium hirsutum
  Clone ID: LIB3493-020-P1-M1-G10
cgtcagcaagaacaaaagtattttgatgacatggttcagaaatgcaaggaggttggtgccacattggttatctgtcaatggggatttgatgatgaggcaaatcatttattaatgcaccagaacttgcctgccgtcagatgggttggtggtgtggaagtggaattgatagcaatagctacaggtggaaggattgtgccaaggttccaggagttgaccccagaaaagttgggaagggctggtttggtcagagagaggtcttttggcactacaaaagataaaatgttatacattgagcactgtgcgaattcaagggctgtaaccatatttattcgtggaggaaacaagattatgatagaggagac

SEQ ID NO: 3776 - DNA, 381 bp, Gossypium hirsutum
  Clone ID: LIB3493-020-P1-M1-G11
caaatacccaaaagtcaagagtagattaaactaatggccggaatcggacctttgactcaagattgggagcccgtcgttattcgtaaaaaagcccctaccgccgccgccaagaaggatgagaaagtcgttaacgccgcccgccgtgccggtgccgagatcgagtccatcaaaaaatcaaatgctgggacgaatagggcggcatcaagtagtacttctttgaacacaaggaagctcgatgaagacactgagaatcttgctcatgaccgagtgccaactgagctaaagaaagccatcatgcaagctcgaatggataagaaacttacccaggctcaacttgctcagatgatcaatgagaagccccagattatacaggagtatgaa

SEQ ID NO: 3777 - DNA, 348 bp, Gossypium hirsutum
  Clone ID: LIB3493-020-P1-M1-G12
catgataaaaaggctgtattatggtacacggacactttgaagccgaagtctacgcttgaagaacattcatgtttgattactgatgttcgtttcagtccaagcatgtcacgccttgcaacatcttcatttgacaaaactgtcagagtctgggatgccgacagtcctggttattcgcttcgtacatttatgggacattctggtaacgttatgtcacttgacttccatccaactaaagatgatcttatctgctcttgtgatggggatggtgaaatacgatactggagtatcaacaacggggactgtgccagagctttcaagggtggtaccggccctggtacaggccaattg

SEQ ID NO: 3778 - DNA, 213 bp, Gossypium hirsutum
  unsure (1)..(213): unsure at all n locations; Clone ID: LIB3493-020-P1-M1-G2
cttttgttggccaaatcatgaccactctcgtgaccggtgtgtttctcctcctactatccgtcgccggcgtcgtatccgccgctagatatatcaccggtgatgttctccggttaccttcggaagcttcaaggttcttncgatggaggagcgatgatgatgaagttggtgggcacaaagatgggcgcgtcctgattgctgggatctaaatgggat

SEQ ID NO: 3779 - DNA, 381 bp, Gossypium hirsutum
  unsure (1)..(381): unsure at all n locations; Clone ID: LIB3493-020-P1-M1-G3
atttcatcaaccatagagcgctgaaggctgctgataatgttagacaacagctcgtgcgcattatgtccaggtttaatctcaagctgtgcagcactgatttcaacagccgtgactactatgtcaacattagaaaggccatgcttgctgggtatttcatgcaggtagctcatctggagcgcacggngcactacttgacagttaaagacaaccaggtggtgcacttgcatccatcaaattgcctggatcacaagccagagtgggtcatctacaacgagtatgttctgacaagccggaattttattcgtactgtgacagatattcgtggtgaatggttagtcgatatagcaccacattattatgatctcgaaaactttccacagt

SEQ ID NO: 3780 - DNA, 359 bp, Gossypium hirsutum
  Clone ID: LIB3493-020-P1-M1-G4
agctgcctcatatctactgagcgtagacaatgggcgcattaaagcgactcaacttgcgccatttcacgctctctgtagttgtactgccgccaatggccacaatataacggccattatcgaaggttgtacagaatactctgcttacaatgatattctcaccctaacatagcttgccggagcgagtaacacccaagagaccatcgctggccttgatcttaacaagggggctatgtctggcctcacatgcaaacacccgctcaccggcgtcaaaaacatgctgagcctatacgttcttctggactactatgacccccaaaagctccacagaatctctgatggcactaccctcaccaccacgc

SEQ ID NO: 3781 - DNA, 356 bp, Gossypium hirsutum
  Clone ID: LIB3493-020-P1-M1-G5
ctattgttggccgggatccacttattgaggtagctattagtttggagaaggccgcattatctgacgaatattttatcaagaggaagctttatccaaatgttgatttctattctgggttaatataccgggccatgggatttccaccagagttcttcactgtgttatttgcaatccctcgaatggctgggtacttggcacactggcgtgagtctctagatgatcccgatacaaagataataagaccccagcaggtttataccggtgtatggctacggcattatatgccactcaaggagcgcatggcgttgaatgatgcagacaagcttactcaagtatccatatcaaatgcctcgaga

SEQ ID NO: 3782 - DNA, 342 bp, Gossypium hirsutum
  Clone ID: LIB3493-020-P1-M1-G6
cttcctgtggacggtgacgtatgttatattccaatggctccttcatgcatgtgtgaatatttggtggccatacccattccttgatttgtcatctccatatgctcccttatggtacttctcggtagcattgatgcatttcccatgctatggtgcctttgctttggtgataaagctgaaacaccatgtatttacaagatggttccctgaatcttatcaatgtgggaggtagctttggcaatttgattgagaaaaaaggttttgaagagaaatgtaattttccccacagaagcaatagggagtctgaaatatactggattctgtgtaaaaaaaacacgcacacac

SEQ ID NO: 3783 - DNA, 354 bp, Gossypium hirsutum
  Clone ID: LIB3493-020-P1-M1-G7
ctttttaacgcaattttgtttaatttaataatttcctcaagttttcatctgaaatagtttgctttgtcggttgtctattcaggaaattaattatttatgaccataatttactagttttgattttgattttgattttgattgttcatgatttatgaaatgtaaataactgtctcgcaattaagcaactcattgccttcagtacttgcttgttatttgtcccaattttccatcttttcgtagtagcttgagtttgcagatgcttgtttcacgaatgtgattttgtcgtggaggcaactaattgttcctatacttgcccaaatgcataacttgagactttttccctttatgaatctt

SEQ ID NO: 3784 - DNA, 376 bp, Gossypium hirsutum
  unsure (1)..(376): unsure at all n locations; Clone ID: LIB3493-020-P1-M1-G8
gaaacaagcaatgcaattgaagatgaggaacatagagtggtggatgaggaagaggcgcctgccttctggattcaagcaaagggtccgcaattatgagcggcaacggtgggcggccatgcgcggtgtcgatgaatgccagatgatcagaaacctccccgaggggctccggagagatatcaagtaccatctttgcctggatttagttagacaggtaccattgtttcaacacatggatgatttggtcctagagaacatttgtgatcgtgtcaaatctctaattntcaccaaaggagaaactattacaagggaaggcgacccagtacaaagaatgctatttgtagtaaggggacattttccaagcagccaagtttttaga

SEQ ID NO: 3785 - DNA, 365 bp, Gossypium hirsutum
  Clone ID: LIB3493-020-P1-M1-G9
ggctaagtcagctaactttgtgatccgtcttggcattgacataggcggtggaactggaaccttcgctgctttgatgaaaattttctacaatgtcacgatgctgaccaccaccttgaacgtcaatgcgccttacagtgaagccgcggtagcaagagggttgatgcctttacacgtgccgttgcagcagaggctaccggttttcgacgggacgatggatctggtccggtgtgggagggcggtgaaccgatggatacccttgccggttatggagtttatgttttatgatgtggacagagtgttgagaggaggtgggtacttgtggttggatcggttctttagtaaagcaatggatttagaggaagttt

SEQ ID NO: 3786 - DNA, 436 bp, Gossypium hirsutum
  Clone ID: LIB3493-020-P1-M1-H1
attttctccctaagaaaaaaaattaaacagccgaccggtgctgacgtaccagagacgcttcaccagatctcacttttctcttccctgatctgggtttattcgttagttccgataaatttattctattcccatggctgctccacctgcaagagctcgagccgattatgactacctcataaagctccttttgatcggcgacagcggtgtgggtaagagttgcctggctttgcgtttttcggacggctcattcactacaagttttatcacgacaattggaattgactttaagataaggaccatagagcttgatggaaaaaggacaagttgcaaatttgggatactgcttggcaagagaggttcgtacaattacaactgcttactaccgtggaccatgggcatattgctgggtatgcgtgactgatgaatcattttaata

SEQ ID NO: 3787 - DNA, 441 bp, Gossypium hirsutum
  Clone ID: LIB3493-020-P1-M1-H10
gtccagatgagtcagcagaagtttgcttctaacgttgtagagaagtgcttaacttttggtggccctgatgaacgtcagttgttggtgaatgaaatgcttggttctaccgatgagaatgagcctgttcaggcaatgatgaaagatcagtttgcaaattacgttgtacagaaagtactagagacttgtgatgaccagcaacgtgagctgatcctttctcgaattaaggtccacttaaatgcattgaagaagtacacttacggaaagcacattgttgcacgtgtagagaagcttgttgctgctggggagaggaggattgctgctcagtctccgaatccggcttagctggtatatgaaggaacatgttttgtacagctaacagaagctatgtgtttatttccttatctttgatcttcagccatggttcgaccccatctttttaga

SEQ ID NO: 3788 - DNA, 363 bp, Gossypium hirsutum
  Clone ID: LIB3493-020-P1-M1-H11
ttctgggccaaagttgagccaaaatgaaccagagggatcacataaggacagattaatagagcaccagattatatcttatgatgagttctctagagacagaaattttgttaaaattggaaatgaggctaaggaagtacttcttagtttgctagctaagttgcagacacaagttgaattgattactactgaacatggcattctacaaccaacagaaaaaatttacgtgaaattggttaaggctttccttgaagcaaggaagctcaaggatttggctcggtttcttatcaaggctgagaaagaaaattccccagtttccaatgatgattcggcattggttcatgttatcaagtcatgcattttact

SEQ ID NO: 3789 - DNA, 326 bp, Gossypium hirsutum
  Clone ID: LIB3493-020-P1-M1-H12
gtgaagatgaagaggaccttattatcaaactccatgctctccttggaaataggtggtcactaatagcaggaagattgccaggtaggaccgacaacgaagtgaagaatcactggaatattcacttaagaaagaaacttttgatgatgggaatcgacccaaacaatcgtcgttcgcttctatctcctacattaaccaaatccaatgcatccaacgactccagttctgcatgccaaccctttaatcccgcaactgcttcggagactatcagcagtacttgtttacccgacctcaatctggatcttaccatcgccccttcccttttccat

SEQ ID NO: 3790 - DNA, 411 bp, Gossypium hirsutum
  unsure (1)..(411): unsure at all n locations; Clone ID: LIB3493-020-P1-M1-H2
cggacgcgtgggggcaggcgcagcaaattgggtttccataaccttactgttttcagtatgtttatcggcgtcctatggtaagaggaccggaatctccaccatggctgacggagccgatgggtttcaaccaagcaacggttttccgcatgaagctgatcctgattcttcaacctctatcgatcctgatcctaccggattcggtgctggcataggtataggttatgaaagaagcccttactgtatcgactgcgacgatgtggatatcatgggcggcagcttttgcggcacctgcaattacggatgcccttaccgcaggttcaattatgggtgttgggggggttggcgcttatatggatgaactcaaacgaacgattaaggaccttaccatgaaactngatgccaatggtcttt

SEQ ID NO: 3791 - DNA, 174 bp, Gossypium hirsutum
  Clone ID: LIB3493-020-P1-M1-H3
atctggaaacagcttgtgatgcaccatagtgtactagtttcattgctgagtggaccaactcatttatgaagcgatgacaatacatgttgtgccttatcatagagctattacactctataagaacatccctggaatgatcatacgtggactcaataccggcgtactgcttaagct

SEQ ID NO: 3792 - DNA, 376 bp, Gossypium hirsutum
  Clone ID: LIB3493-020-P1-M1-H4
caagagtgaaagggccgtggtcaccggagaaagacgcggtgttgagtcggttggtggcgaagttcggggcgaggaattggagtttgatcgcccgaggaattccgggtcggtctgggaaatcgtgtcggcttcgttggtgtaaccagcttgacccttgccttaagcgcaagccttttactggtgtagagatccccaagtttgttgacaccgtcactcctcaatacaaaccaaaatttgatgcattgcttgtagaattgaaagaggcagaggagaaatccttgaaagagtctgagcgattggagaaagaaattgccgaggttcaagaacttaagcaaaagatcagcaccatgaccgcagacgagtactttgagaaaca

SEQ ID NO: 3793 - DNA, 176 bp, Gossypium hirsutum
  unsure (1)..(176): unsure at all n locations; Clone ID: LIB3493-020-P1-M1-H5
cgcgtncngtncanatgagtcagcagaagtttgcttctaacgttgtagagaagtgcttaacttttggtggccctgatgaacgtcagttgttggtgaatgaaatgcttggttctaccgatgagaatgagcctgttcaggcaatgatgaaagatcagtttgcaaattacgttgtacag

SEQ ID NO: 3794 - DNA, 375 bp, Gossypium hirsutum
  unsure (1)..(375): unsure at all n locations; Clone ID: LIB3493-020-P1-M1-H6
aatctctcttttttgctgccaaaaaggaaaaaacaagtaaaccatgtcttctcgtgtcctctgcttcgtatctcttttgctctgtattttccccgccatcgcctttgctttgcatttaccactaacgctcacacatttcgatgccaatgacccatctcgagatccgtaccagatcctcagctaccttgcctcttcctctttagccagagcccatcacctcaaaaacccccaaatcaccgncactgncaccagcgacgccaccaccaccaccccacttttttcccacagctatggaggctactccatttctctcagctttggcactccacctcaaatccttcctttcgtcatggacacccgcagtgacttcgtttg

SEQ ID NO: 3795 - DNA, 371 bp, Gossypium hirsutum
  Clone ID: LIB3493-020-P1-M1-H7
ggaaatggggaaaccacacgttgtggtaatcccttatccagcccaaggccatgttattcctctcatggaactctcccaaaacttagccaaacaaggcatcaaaatcagctttgttaacacagtgtttaatcacaagagggtcttggatgcattcggcgagaaggtggatgaaaatggcttacttcatctactttcagtccccgatggactagaagatggggaagataggaatcagttagggaagttaactgaaagtttatgccaggttatgcctactcaactcaatgagctcattcataaggttaatggatcagatgatgataagatttcatgtgttttaactgatattagcatggggttggctcttgatt

SEQ ID NO: 3796 - DNA, 400 bp, Gossypium hirsutum
  Clone ID: LIB3493-020-P1-M1-H8
ggggatttggggataaaactgaaccatgggctactgatctggtttactctatggacttatggaaggatcaagttctctatttcgtaggagagtcgcttgttgatccttggtgatggctaacactcactccgctgacttcgactctgttgagcctagtggcgcagtattcaatggtgatcgcgtcattacgttatttcctcggcatgatgtggttaagctcgatgagggctcctttcttcagtggcaatagcaggtaaggcatattgttgctggttatgatttggtaggatttctggatggttctgtttctgctccaccttgatttgttcaaacttcaggcggtgaacttggtgtgaatccatctggcttggtcttcttttaacaagatcatttacttacc

SEQ ID NO: 3797 - DNA, 417 bp, Gossypium hirsutum
  Clone ID: LIB3493-020-P1-M1-H9
aagatttaagctttttatttaagtgtttttcttttcctatatttaaattttagggacactactgcatttgtttttcaataacaccctaaatttggtttcccagaaaaaaaagaaaccaatagttgcaactgataaagaaataacaatggcaggtcaagttctcgttgttgccctcgttttcatggcggttgttgtggcgtttgcgggggattcagcgccgtcgccgtcccctaaaagttcatcgccatctaaagggggggcgtctccgccttccaagtcaccttctacctcttctccttcctacaagaacttctctgcattcttcccatcttccttcttccgcggcgggttcaagaaaaacaacagctctagtagcaggaacaggttcccttctttggcaccattatcaacgaaatt

SEQ ID NO: 3798 - DNA, 331 bp, Gossypium hirsutum
  Clone ID: LIB3493-021-P1-M1-A1
cgaaattggtactcttggttttggttttgaaggtggtcctgaaaaatgttgttcttctggatgttccggtaattgtaatcctggtggtttcgttctaccatttcctcaaattccagaaatcccaagaattccacagatcccacagatcccacaaatcccacaaattccactaatcccacagatcccacaagtcccacaaatcccactaatgccaggacagtcgggatgtgagagtggggagtgttaccgtcagggttgcggtgggacttgtgctgagtgtggtcagcccaggtgcgcatcaggatgttgccaggctgaaactgtaaagagc

SEQ ID NO: 3799 - DNA, 411 bp, Gossypium hirsutum
  Clone ID: LIB3493-021-P1-M1-A10
tgttcttccaaaaaaaagaaaaaacccaccagctagattgatgagactagatttcacaagatatgggatttatcagacacagattagaaagaaagatcattcataactctggtctatctaatagttggaagacacggtgaagagcttcacatttgggccccattttatcacttttgagctgctccttaagctgttctcaccatcctggctgaataactcattgacctactatatcttccggaccttggcaatggtgaggctgccatggattcttcatcagatgatgatgatgagaatccaccacatgacattgacatactgaaatgttcaagcattccattcaagtttctctccttcaaccttgatgaaacgacccgaacaaggtcttctggtggacctccgcagtcgatg

SEQ ID NO: 3800 - DNA, 389 bp, Gossypium hirsutum
  Clone ID: LIB3493-021-P1-M1-A11
ctccgccagttccagtccataagcctcctccagttccggtatacaagaaacgagtccctcctccggttccaatctacaagccccctccagttcctgtatacaacaaaccactacctccccgggttccagtgtatacgaagccacttccaccacctgttccaacctacaatccaaaacccctccctcccattccttacaagccactccctccacttcccaagatccctccattccctaagaagccatgccctccccttcctaagctacctcctcttcccaagattcctcccaagtatttccaccaccaccctcctcttcctaagctgcctcctctccctaagattcctcccaagtatttccaccaccaccccaagttaggaaaatggcct

SEQ ID NO: 3801 - DNA, 470 bp, Gossypium hirsutum
  Clone ID: LIB3493-021-P1-M1-A12
gagccacagaaccgtagccaatcaagtccgggtgctgtacccgacccggctgttgctaatggagtcccttctttctcagagttctccttggctgacctgaaagcggccaccaataatttcagttcagataacatagtttctgaaagtggggaaaaggctcctaaccttgtttataaaggtcgtttgaagaacaggaaatggattgctgttaagaagtttactaagatggcttggcctgaccccaaacagtttgcggaggaagcttggggagtagggaagttgagacacaagaggctggcaaatttgataggatattgctgtgatggagatgaaaggctgcttgttgctgagtacatgataaatgatactcttgctaagcatttgtttcactgggaaaatcaaaccatcgagtgggcaatgcggataagagtagctttctgcattgctgaggctttagattattggagtag

SEQ ID NO: 3802 - DNA, 413 bp, Gossypium hirsutum
  unsure (1)..(413): unsure at all n locations; Clone ID: LIB3493-021-P1-M1-A2
cccacgcgtccgatcttcctcttcctctagaaggggataattaataaattactgtcgggcgaaaaaaaagggtaagagatggctcgattaatgttaatatcgatgctatttctcttggcaggatcaatgcttatggtccagggcggagatcccaccctttttttcgaatggaacgtcacctatggcaccattgctcccttgggagtgccagtaaagggtattcttattaacgggcaattcccgggaccaaatcttaactctaccaccaacaacaatatcgtggtcaatgtgttcaataaccttgatgagccattccttgtaacatggngangcgtgcagcataggaagaactcttggcaaagatgtgttctgggaaccaactgtcctatccccccttggaagaattacaccta

SEQ ID NO: 3803 - DNA, 357 bp, Gossypium hirsutum
  Clone ID: LIB3493-021-P1-M1-A3
aaaaaatccttgaataaaattatcaagtaataagttttaagtataacaaaatttgagaaacaccaaaggaaaattcataaaagagcatccagcataagttcattttaggtgccaaacttaaaaactacaaaatctaagacacttgacatgctccaaatatcaaatagatgactatcataacagtcatcatcggctttaagccactggcggaagttcaatctcggtcggcacgggtgcttccaccttgataacttcatcatcctttggaggggtggtgtgacaagaatcccgagggggagtgtgggccttgcttaccctttggatcccagtcaaagcatgatcttcaccttgatgccc

SEQ ID NO: 3804 - DNA, 389 bp, Gossypium hirsutum
  Clone ID: LIB3493-021-P1-M1-A4
cccaatctccggttttgagggtgacaacatgatcgagagatctacaaacctcgattggtacaagggtcctactctccttgaggctcttgaccagatcaccgagcccaagaggccctcggataagccactccgtcttccacttcaggatgtctacaagattggtggtattggaactgtccctgttggtcgtgttgaaactggtgtcctcaaacccggtatggttgttacttttggtcctactggtctgaccactgaagttaagtctgttgagatgcaccatgaatccctcccggaagctttccctggtgacaatgttgggttcaacgttaaaaacgttgctgttaaggatcttaaacgtggttttgttgcttcaaactccaaggatgatc

SEQ ID NO: 3805 - DNA, 412 bp, Gossypium hirsutum
  unsure (1)..(412): unsure at all n locations; Clone ID: LIB3493-021-P1-M1-A5
tattgatgcacctggacaccgtgactttatcaagaacatgattaccggtacctcacaggctgactgtgctgttctcattattgactcgaccactggtggttttgaagctggtatctctaaagatggtcagactcgtgagcatgctttgcttgcttttaccctcggtgttaggcagatgatttgctgctgcaacaagatggatgcaacaaccccaaagtactcaaaggcaaggtttgatgaaattgtcaaggaagtctcttcttatcttaagaaagttggttaccaaccctgagaagatcccatttgtcccaatctccggttntgagggtgacaacatgatcgagagatctacaaacctcgattggtacaagggtcctactctccttgaggctcttgaccagatcaccgagcc

SEQ ID NO: 3806 - DNA, 470 bp, Gossypium hirsutum
  unsure (1)..(470): unsure at all n locations; Clone ID: LIB3493-021-P1-M1-A6
attttacttcatattacctaaatttaataattaagaaaataaagattgagatataggaatgagaaaggtggagattgcaataatatgtctcttttcattggttttcgtagccatgcctgttaaactgccacaaaggccacagctgatggcaccaccccgtccactttgtgcttcacaattttccctggtcaactatgcgtgtgcggcgctgccattaacccctttctcaccaccacctcctcgcaatcgcaaccatagccgcagccgcagccgcagccgcagccgcagtaacagccgccgtcgcagtcgcaagcataggcgcaggcacgggcaccgtgagacggaaatgcaaagctactgttgtcaatggctgaagcaggtggacactgagtgtgtgtgcgacgttctggttcacttgcccaccttcctttctaggcctaatcatcagtacacccgnttgtcgtgatgat

SEQ ID NO: 3807 - DNA, 416 bp, Gossypium hirsutum
  unsure (1)..(416): unsure at all n locations; Clone ID: LIB3493-021-P1-M1-A7
cccaattcttatggtgggaattatccacctgctcctaatacatatggtgggaatgcaaattatggaatggattcagtccctccacctacaagctatactggtggacctacatcataccctccatcttatggtggccctgcgggtggctatgctggtgagggtttgagtgatgcacggactggtggtcgtggtggacctcctggtggatatgacggtgggtatggttctggtggtcctcgaaatcagggagggggttaatgggtcctcctgttgaagctccagctaagatcaagcagtgtgacggcaactgtggggattcttgcgacaactcaagaatatacataacanatttgccacctgatgttactaatgaagaattaagagacctttttggcggcattggacaagttggaaga

SEQ ID NO: 3808 - DNA, 434 bp, Gossypium hirsutum
  Clone ID: LIB3493-021-P1-M1-A8
cttgtgtcgtgtctgacgggtttcacttgcatagctagcaaagctaaagagtttgcaagatggggagcatggatagcttttggcagctgggggattatcttcgaggacaatcaaaagcctcagaggataaccaatggctgatggttgcctctaaattggctgagcagacgaggacaaagggtgaacgcctgagcaatcttgatctttcgaagggtccagccgaaataaggacaagggataaatttggtttccgggaagacaacaaattcgagaaccttaacttcaatatgttaaacttggactccaagattggagataatgtaagcaaaagctcattccgaaatggtacctacaatataaatgctgtttaccagaaaaataatagcaatagcctgggaaacctggctggcaacaaatatagcggcaataatcat

SEQ ID NO: 3809 - DNA, 462 bp, Gossypium hirsutum
  Clone ID: LIB3493-021-P1-M1-A9
atttttaacagtaaaaatggatgattattttaacaaaatgactaatttattctttgatctaacatacagggactaatttactcatattttgaataaataggtgaaatgtaatatgatttctaatacaaaaacttctatagtacttttactaaaaattccataatgtgtgggataaaatatttaatccttttttgggcttatttgcagtgacttcatagatgactgggtgaaaattggtttgcctgcaaagaaaaaggtcctggaagaaaataatggcctgccttgcgaagaactattgaagctttgcgaaaaggtaaattaatttaagctgattaactatggatatgttgattgcaaattaagggagtaaaattagagcccgcaaacttttaaaggtatgattgcattttattccttttactttaaaaatatataacttattccttttacattagaaaaagg

SEQ ID NO: 3810 - DNA, 371 bp, Gossypium hirsutum
  Clone ID: LIB3493-021-P1-M1-B1
cggacgcgtgggttcgaaaaaccccttatgatttccgccggcctcgcgagatcggcagcaagttcgaccaattaccccacggatacgacataaactacgtgctccataaatcgaggcggtcgagacacttgaggaaagttgctgtggttgtagaaagcaaatgtggaaggaaaatggagctatggaccaatatgccaggggtccagttttatacaagcaatatgttgaagaatgagaagggcaaaaatggaactgtgtatggaaaacatgcagggttttgccttgagactcaaggattccctgatgcagtgaatcacccaaattttccatctcagattgttaagcctcgagggatatataagcattttatg

SEQ ID NO: 3811 - DNA, 395 bp, Gossypium hirsutum
  Clone ID: LIB3493-021-P1-M1-B10
cccagtttttgttttatctttggggctgtcaattgatggaatccaattcatttcaagtgattaatcataattatttctctttttgttttcagcttgttagaagcaatagatcttatacttgaaggagctcaaaaccttgtggtgccaatcaaaaccaagctcagcaacaagagaaaacagcaccagaagccatcaccgacggtcactgtccacaaaggccgtgaattctgctggttaactcaagaagatgtgattagattcctactcagctcaattggcctcttttcacctgtccctgctttctccatcgacactcttggcatcatcagctctgaaatcctcaccattgagtaccacttccctgcttctgcagccataggagccatttctcgaac

SEQ ID NO: 3812 - DNA, 390 bp, Gossypium hirsutum
  Clone ID: LIB3493-021-P1-M1-B11
gttaagacaatggctaccatcagaatagctcttcgtaacgtccaccgcatcgttaatacctccgccgttgccggccgtacaacgaccgttttcaggccacagtatggttgggtttcaacatatttttcaactaatattagtaacactcagccattaaacatcgatctttctaacgaagaaagcaaaaggcgtctttataacagattgttgtataggagcaaacaaagagggtttctggagctggatttggttttgggaaaatgggttgaagaacatatccattccatggatgaaaatggaattaaagctcttgttaatgtcctcgatttggaaaaccccgacctttggaaatggctaaccggtcaagaacaaccacccgaagcagtgacc

SEQ ID NO: 3813 - DNA, 436 bp, Gossypium hirsutum
  Clone ID: LIB3493-021-P1-M1-B3
aaaagttatctcatcttgagcaaagttacagtcgtcctcatcgaacaactatggcagccatcaaagtccacggaagccctctgtccactgctacacaaagggttcttgcatgcctttacgagaaaggtactgattttcagtttgttcccataaacatggctgctggtgaacataaatccgaaaactacctttccctcaatccattcggtcaagttccagcttttgaagacggggacttgaagctcttcgagtcaagagcagtcacccattacattgctcatgaatacagcgacaaggggacccaactcttaattcctggctctaacaaggatattgctgtcttacaattattgaaagaagtggaagcccaccagttcgattctccatgttcaaaaatagccctggggagcgttttacaaagccattaatgggcatg

SEQ ID NO: 3814 - DNA, 459 bp, Gossypium hirsutum
  unsure (1)..(459): unsure at all n locations; Clone ID: LIB3493-021-P1-M1-B5
cggcaaggataccaagttgcacctgcaccacaagttgcacagcagaagaatcaccaaatatctgatgggaagagtggatctagttcaaccagcaaggatgatggaaaaaaggcaagttcggggaagtcgcatacaacaaatggtcagacatatttttttgacaattcagctagatctttgaattttgtatcctctaccgtcactggaaatcggactccgtgctccattacctccactacagtagccataagtcctcccattgttgctaattcatcaaattcccatcaacagctgcttcaacttcagaagcagcacatggtgcaacaacatcatcagcaaccttctacagcttctcgaagcanagttcagacaaccaacaccatgcctgcatcttccatngctgctaaattttctagcaatgctgctatatacacacatactgtgccccaaaacaaccct

SEQ ID NO: 3815 - DNA, 418 bp, Gossypium hirsutum
  Clone ID: LIB3493-021-P1-M1-B6
gaaacttgaaaacgacgacgtagtgagaaaaaaaaaaaaccatgtcttacgattatattttcaagtacatcatcatcggtgacactggcgtgggaaaatcatgtttgctcttgcagtttactgacaagagattccaaccggttcatgatctaaccatcggtgttgaattcggtgctcggatggtcaccattgatggcagacccatcaagcttcaaatctgggatactgctgggcaagaatccttcaggtccatcaccagatcttactatagaggagcagctggagctcttctggtctacgatataaccaggagagagacatttaatcatctagcgagctggttggaagatgctcgtcagcatgcaaatcccaacatgacaatcatgctaatcggaaacaagtgcgatctttctcaccg

SEQ ID NO: 3816 - DNA, 393 bp, Gossypium hirsutum
  Clone ID: LIB3493-021-P1-M1-B7
caacaagttcacagagaggcagccaattgggaccgcggctcagactcaagatgacgggaaagactattctgaaccaccaccgtctgcatttttcgagcctggcgagttaacctcatggtccttttatagggctgggattgccgagttcgcggcgactttccttttcttgtatatcactattttgactgttatgggagttgttaaggaaaaaactaagtgcccaactgttgggattcaagggattgcttgggctcttggtggtatgatctttgctctggtttactgcactgctggcatctgaggtggccatatcaacaccggcagagacttttggactgttcttggcgagcgagctgtcgttgacgagggcaattttctacatggagatgcagt

SEQ ID NO: 3817 - DNA, 387 bp, Gossypium hirsutum
  unsure (1)..(387): unsure at all n locations; Clone ID: LIB3493-021-P1-M1-B8
cggacgcgtgggatattactttcgctctcttcctttggtactcaagaaaaagcaagagatgggtttttcaaggaaagagtacgagttcttgagcgagatcggattgagttctggcaatttgggatgttttgtgaatggcacctggaaaggaagtggccctgtggtttctactcttaatcctgcccataatcagaaaattgccgaagttagtgaggcttccatccaagactatgaggaagggatgcaagcttgcagtgaagcagcaaagatttggatgcaggttccagccccttaagagaggtgacatagttcgacaaataggtgatgcattgagatccaaactacagcagcttggccgncttgtttctcttgagatgggaaaaattc

SEQ ID NO: 3818 - DNA, 413 bp, Gossypium hirsutum
  Clone ID: LIB3493-021-P1-M1-B9
ggcggggcgatcccggtgtcgcgttcggacgagagtgtgatcggtccatccttggcggaacctcggccgtccgtttcgaaatctgaagaagccgatggtgaaggtgacgtggtggagatcaaaagacctggtaatcagaatcataacagtccgccgtccgatctggcaccgacgttctcgattgactcggatgagtaccgcgcgatcctcaaggacaagctccatcaagcctgcgcagctgttgctctctctcgtgcatcatctgttaaggcagaagttttctctgcgcaagctgaagatcaagcgcttcaatcgagatcccaaattcaaggttcctcaaaggctcaaggacagggtgaactagatgctacacctaatgaagtcctggctatgtctactacacagacaaaatc

SEQ ID NO: 3819 - DNA, 341 bp, Gossypium hirsutum
  unsure (1)..(341): unsure at all n locations; Clone ID: LIB3493-021-P1-M1-C1
tgacggctctcagtatcaatacaaagaatcttttactaaagggaaaggaggtgattcttcactacctggggcctgaaggggagatggattggatgcctgcattttctgaaatcagtcacttgttaaacgggttgggtaatatacaaatcattatggtaggacctgaagttccgacaaacttgtcaggtaccacgtcaggaattagtagcagagttagggtgaatctagtaagggtgtttatcaggaagaagccacctacttgccttccccccatgttatagttgctctgaactgtgcattnggataggtattccaacttggggggtgctcttgatctgatt

SEQ ID NO: 3820 - DNA, 397 bp, Gossypium hirsutum
  Clone ID: LIB3493-021-P1-M1-C10
cggacgcgtgggctactgcactgctggcatttcagggggtcatattaacccagcggtgactttcgggctgttcttagcgaggaagttgtcgctgataagagcagtcttttacatgataatgcaatgccttggagctatatgtggcgctgccgtcgtaaagagcttccaaaagacccaatacgaaaggctaggcggcggtgcaaacacggttagctcgggatatagcaagagtagtggccttggtgctgagattgttggtacctttgttctggtctatacggtcttctccgccactgatgctaagcgtaatgcacgagactcccacgtccctatcttggcaccgctgcctattgggtttgctgtgttcctggtccacttggcaacaattcccgttact

SEQ ID NO: 3821 - DNA, 466 bp, Gossypium hirsutum
  unsure (1)..(466): unsure at all n locations; Clone ID: LIB3493-021-P1-M1-C11
cggacgcgtggggggagaatcatcccagcaattgctacctccacagccatggccaccggtcttgtctgcctagagctttacaaggctcttgatggaggccacaaggtagaggactaccgcaacacttttgcaaaccttgcactgcctctgttctccatggctgagccagttccacccaaagtcatcaaacacggtgacatgagctggaccgtttgggaccgatggatcctgagagacaacccaactttgagagaactcatccaatggctgaaggataagggcttgaatgcctacagcatatcttacggaagttgcttactgtataatagtatgttccctcggcacagggagcgaatggacaagaaggtggtagatctagcccgggaagtggcaaaggcagaactgcctncgaatagaaagcatcttgatgtggtcgtggcttgtgaggacgacgacgacaatgatg

SEQ ID NO: 3822 - DNA, 381 bp, Gossypium hirsutum
  Clone ID: LIB3493-021-P1-M1-C12
ttttgaacccactcttcctttccattttcctctctttttctcttcatttccttcatctctcacaaccattaaaaaaaaaaaacttttcaaactccattgatataaacctaaaaaagcttagcttaatgggtcttgatgatgcatgtaatacgggacttgttctagggttaggcttctcatcgacgccggaaactccatccaaggccgacaaccaaaagcccaagaagtcaacagccaaggtggcgccggtcacaagttttgaaccattccttacgctgggtctttccggtgatagctacggagttactgttgccaaaaaggttgatgtcaacaacaaaggtggtggttatcttcatcatcgccatgaagactctcccccca

SEQ ID NO: 3823 - DNA, 481 bp, Gossypium hirsutum
  unsure (1)..(481): unsure at all n locations; Clone ID: LIB3493-021-P1-M1-C2
ccaaaactgcatggttactgcacaaggaaggaatgatcttggaacaaactcagccattgtgcttcaaaactgcaccatctcgggggcccctgattacatcccagtgaaggataagaacaaggcgtacttggggcgtccttggaaacaattcgctaggtccatcataatgcaatctaggatcgacgacatcattcaaccagagggttatgcccccatgacaggcaccataggaatagacacttctttcattgccgagtttggaaacaggggacccggtgccgataccagccgtagggtagcatggaaaggtatcaaaaagatagatataaatgaagccaacaaatggactcctcgcatatttctcgaatccgagacttggattcgagttccagcgttccctatagtcccgacatggtcccctgagtctaagcagcttattatcaataccaacgcccatagttngcttattatcaatatcatt

SEQ ID NO: 3824 - DNA, 298 bp, Gossypium hirsutum
  unsure (1)..(298): unsure at all n locations; Clone ID: LIB3493-021-P1-M1-C3
aaagaataaaaacaacaganaatcttcatttctttccttgcactgagaaaataataaatccttggagaaaacccaattgagcgctggaaccatcgaattcgaaatacacttgtacctgttcttttttatctcttcatataattggactgaaataagcagaagaaaaaagcgacgcggagtaacaagaaaatgaagcttcagctttgcttcaccttctccttctaatgattttcgccccccttttcatgggctcatatcaacatcgctgcgtttttgtggggaatataccatatgatgc

SEQ ID NO: 3825 - DNA, 420 bp, Gossypium hirsutum
  unsure (1)..(420): unsure at all n locations; Clone ID: LIB3493-021-P1-M1-C4
cggacgcgtgggctcaatccaactcaccaatggacgcgcaagacggaaatcagcaatcacagcaactcatccttggtcacaacgtcttcctcctcaagcatccagatgtccctgacatcgagaaggtccgtctcaaggatgaagtcctcaactcggttaaatccaatgaaatggctccgtattatgaaaccctagttgccgataaagtggtagagctggatcagaacgttttggacgcgatgcgtgccaagaatgaggaggagattaagagctcgacgagaagattgctgatgctgaagaaaacttgngtgaaagtgaagttcgagaagcacatttagctaaatccttatattacattcggataggtgataaggagaaagcattggagcaacttaagttgacggaaacccagacagtcgc

SEQ ID NO: 3826 - DNA, 456 bp, Gossypium hirsutum
  unsure (1)..(456): unsure at all n locations; Clone ID: LIB3493-021-P1-M1-C5
tcgcaagttatttggtgatcaagatttgagtacatctttattggacttgggtctgcttaacagacaagcactgatagtggttccacgtcagagaagcactggcttccaagggcaaagatcatttgctgaccaaagaaattctacaccttctgaagctactgcaggaagcaatgggggatattttgcatacgttagaagctttatgtcctatttcaatcctttttcttatcttggtggtggtactggtaccagctcttcaactactggaccggaatctcaaagtggcatctgggaatacagtccaaaccctacactgcaaaataacttggctggagcaaacaggacatattcacctaactcgacaaacagaaacagttcgactgacagcangaacagacgacccacaacatcccgatatggtagcaatattcacacactaaaacacgatgaggatga

SEQ ID NO: 3827 - DNA, 464 bp, Gossypium hirsutum
  Clone ID: LIB3493-021-P1-M1-C6
ctcaattactaatatctattcttcacttcttccatttcaacactctcaaactatattctaattttgaggttgtgtactgatgtaaacacaaaaaacaaaacatattgtggggagttcatattacatgttttttgggttttcttgaaagctttgtcttgttgggttttgtgttttgtttttggatgggaactgagagaagtgaagaaactgtgttgaagaaacagaagaaatataatgttggggaaagtgagagagggcaatggttgttgttgtgcagttgtaaatttctacaatcttgtacaagttggtcttgttttagacaagggtgttactctttttacaagtgatactacaaccatcttgcatctcttaaatcttgtataaaaacaaaacttctgtcccaaaacaatacacaattaaggctctctctctttttttcttttctttttaatctgtttgaaatt

SEQ ID NO: 3828 - DNA, 296 bp, Gossypium hirsutum
  Clone ID: LIB3493-021-P1-M1-C7
ttccttgagagaatagataatgagttctttaagagcttgcagtgcattgatccacacactcgtgagtatgttgagagactgagagatgaacctttgtttttggtccttgctcaaaatgtccaggagtatttagagcgtattggtgatttgaagtctgctgctaaggttgctctaaggcgggttgaacttgtctattacaagcctcaagaggtttatgatgctatgaggcaactggctgtgctatcagaagatggagaaaaagatggcgatgagactaaagtggaggaaacacgggg

SEQ ID NO: 3829 - DNA, 462 bp, Gossypium hirsutum
  Clone ID: LIB3493-021-P1-M1-C8
cccacgcgtccgaaaaagatggcgtctgtaataaaatctgcaatcttaattctgtcggtgtttttatctgtaagcttcagttcgggtgttaggttgctccaggaacagcccaatgatgacctcaaaaacatggacgctattcctcccattgatgcactcaaccctaccgagttcaatggacccggtgttggcattcacgaagatcatgttgtcccaaaaggttccgaaattggtactcttggttttggttttgaaggtggtcctgaaaaatgttgttcttctggatgttccggtaattgtaatccctgtggtttcgttctaccatttcctcaaattccagaaatcccaagaattccacagatcccacagatcccacaaatcccacaaattccactaatcccacagatcccacaagtcccacaaatcccactaatgccaggacagtcgggatgtgagagtggg

SEQ ID NO: 3830 - DNA, 422 bp, Gossypium hirsutum
  Clone ID: LIB3493-021-P1-M1-C9
ccctaattatgcagccttgtagtcgtgaaatgcaagcaatgaactctctcttaaacccgacccaacaaatccctctccaagaccttcaaatcaacggtaacagacaccaccatcaacagatccacgtcccatcatcatcgcagttccagtatcccacacccacttcaacaacccaccatgacgacagcttcttagaacaaatactctcctccaccacgtccttcccgtggtccgacgaaacgggtcctcccaaccccgaggataacaataacgccggcttcaactacgatgacatggttctagcttccaagcttcgacagcatcaaatcaacggcggagctgctggtaacccttttgccgctatgaagatgatgttgatgatgcaacaacaacaacagcaacagcagatgatgttagcggga

SEQ ID NO: 3831 - DNA, 340 bp, Gossypium hirsutum
  unsure (1)..(340): unsure at all n locations; Clone ID: LIB3493-021-P1-M1-D1
cccgaagtcaagcaaccatcgaatggacaatccctccatctgcctcgctaggagtttacagaataagacattttggtgctgcgaaacggcttatgggatcgattcagcatttcacgggtacatncagtgcttttgtggtagcatgatgaaatagataaactatctgttcatacgtatgggagcttagatgctttcattttggtgcgctttatatgtaacgagttgccattagactatagcacgtcgaatctgtaatgctgaaactcgtctagcttcattgatttccacttcagaacaatgaaatttcgatgaattaaaatctgtcttccatgggtcattt

SEQ ID NO: 3832 - DNA, 468 bp, Gossypium hirsutum
  Clone ID: LIB3493-021-P1-M1-D10
gtccctatctcattcttgacccaccctgagttccaatgtttgcttcgacgagcggaggaagagtttgggtttaaccatgatatgggccttaccatcccttgtgaagaagttgtttttcgctctcttgcatctatgcttaaatgaaaatgggaaaaaagaatatattgagttgcgaaatgaaggggttctgcctttgcatttttggagaaagatggccaagagaagcatagcaaccatatatattgaatagctagtttctcttttttctaacatcatttcttcattgtgattcttgatcccttttggggttctttcttttctttttactacttcgaacccggggtttttaatgttttattaattagttattagtgactctaactagacctaagaattataacattttctgggtccaaccatttgtataaacttgtgtttcctcacaaattttgtgagagaagttgaatg

SEQ ID NO: 3833 - DNA, 441 bp, Gossypium hirsutum
  Clone ID: LIB3493-021-P1-M1-D11
ccagtttgatgtactttataacaaggatcgtgttattgagatcagcgcaaggatggatccacatttgctcgtggacttgactgaggataaggaagttgatgctgagtttatgtacactgtgaaatggaaggaaactgatactccttttgagaagaggatggagagatattccatgtcttcttctttgccgcatcatttagagattcattggttttcaattatcaactcttgtgtgacggttctccttttgactggtttccttgcaacaattctcatgcgggtcttgaagaatgatttcattaagtacggtcaagatgaagaagcagctgatgatcaagaagagactggatggaagtatattcatggagacgtattccgtttcccaaagtacaaatctctctttgctgctgctctcggatctggaacacagctgttcacttt

SEQ ID NO: 3834 - DNA, 394 bp, Gossypium hirsutum
  Clone ID: LIB3493-021-P1-M1-D12
cggacgcgtgggcaaatctgacatttttattacctcaatctcttcttcatctctttcaacctctactctgtttctggtttctaagctttcatggcttcttccattatatgcaagcctttccttagagctactaaacccaattcttctctttatcctgaccttcaaagacttcattttccctctcttcgcatctcaatcaaaccaagaacccacaaaaagcttcagatacaagcagctgggagcacatttggaaattatttccgtgttacaacatttggagaatctaatggaggtggtgttggttgtatagttgatggatgtcctcctaggattcctctctcagaagctgatttgcaaggtgatcttgaccgaaggaggccaggtcagagccgag

SEQ ID NO: 3835 - DNA, 411 bp, Gossypium hirsutum
  Clone ID: LIB3493-021-P1-M1-D2
tagtttcatgacctcaattttccttcaaagtttatccatttttttgttcatgattttcacagttctcaaagacgccgatcccgcttttatgataattaggtatgtactttatggatcaccgtgtccccttgtatccaggctttactttacatagcaaactgttgatgatgagcccagcctaccttcaattttcactgatatttgacaaccctaaaacccatggctttgctcaaagggttctggggttataaaccagtcatattcattaactaatttgctcaatttttgcaagcagccgcatacccaagaagtgaagctgaggattgatcctgtccatgtggtgagcgatatggtaattgctgctgcagacagttttagattcttaaacatgtaaaaatacccttggagcct

SEQ ID NO: 3836 - DNA, 453 bp, Gossypium hirsutum
  unsure (1)..(453): unsure at all n locations; Clone ID: LIB3493-021-P1-M1-D3
cgacaatggcaaatgacaactctataaaattccccaaagccaaaacatttcattgatttttaaggcgaaaaaaagaggaaaaggaaaacgaagaaaatggcgtccctctctgcccaaatccctctctgcttggccttaatgatggctgcctgtttgatgataggcatcaatggaagcatagatggagctcagagggagttcgattactttgctttgtctcttcaatggcccggcaccatctgccacaagactcgccattgctgctcctccaatgcctgctgccgaggctcgaactctccaactgaatttaccattcatggattgtggccggattataatgatggaacctggcccttcctgttgttaccgatctcagttttgtgtcaaagagatttcaacattgcttngatgcacttgagaagactggncatcgttatattgtggcaaatcatc

SEQ ID NO: 3837 - DNA, 407 bp, Gossypium hirsutum
  Clone ID: LIB3493-021-P1-M1-D4
ctcactattaaaccttctgcttagcttaaaaaatcttgaatccgtactctcctacttccctcgttatcgtcaatggcttcggacaagaagattaagatcgggattaacggatttggaagaatcggacgtttggttgccagagttgctcttcagaggaacgatgttgaactcgtcgccgttaacgatcccttcatttccaccgattatatgacatacatgttcaaatacgacagcgttcacggtcaatggaagcaccatgatcttaaggtcaaagactctaaaaccctcctcttcggcgaaaaacccgtcactgttttcggaatcaggaaccctgaggagattccatgggctgaagccggggctgagttcgttgtgagtcaactggagtgttcactgacaaagacaag

SEQ ID NO: 3838 - DNA, 425 bp, Gossypium hirsutum
  Clone ID: LIB3493-021-P1-M1-D5
ggataagcgtctagctgaaaaacccaatcccaacttgtttcttcatggcgtctccttcgctcttacagtccacatcctcctcgttccacggcccctcccctttccttgcaccaccattctccgcgcgcctgccctacgctaaccccagaaatggatacgccggcgtcgtttcggtgagggcaacgggagagattgtgttggtggataaatcggaagccgaaaaaccctaccgtctcaaaactacttacctagacaaaattattcctttgcttaaagaagagttcaagtacaccaatattcaccaggttccaaagcttgaaaagattgtggtgaattgtgggattggagatgctgcccagaacgcgaaaggcttggaagccgcaatgaacgagatggcattgataacggggcaaagacctgtgaag

SEQ ID NO: 3839 - DNA, 467 bp, Gossypium hirsutum
  Clone ID: LIB3493-021-P1-M1-D6
ataaattccaggtgaaggatcagattggcagctacatgtactatccggtgacggctatgcacaaggcggttggtggtttcggtggcctccgtgttaacagccgtctactcatccctgttccctacgctgatccggctgatgactatactctcttagtgggagactttttcaacaagggacacaccagcctcaagaagattcttgatagcggtcgcaaccttgggagatgtgacggtgtccaccttaatgggaaagttgcgaaaggtgatgggaaggatgaacctctgtttacgatggaggcaggcaaaacgtacaagtacaggatttgcaatacgggtatcaagacatctctgaacgtcaggttccagggccacaccatgaaattggttgagatggagggttcccacacaatgcagaatgactatgactcccttgatgtgcatgttggacagtgcttcagtgtgctt

SEQ ID NO: 3840 - DNA, 443 bp, Gossypium hirsutum
  unsure (1)..(443): unsure at all n locations; Clone ID: LIB3493-021-P1-M1-D7
tggaaacaagaacatcaatgctaaattagttctacttggggatgttggagctggaaagtctagtcttgttttgcgcttcgttaaagggcaatttgttgaatttcaggaatcaaccataggtgcagcttttttctcccaaacattggctgtgaatgatgcaactgtgaagtttgagatttgggatacagctggtcaagagaggtaccatagcttggcaccaatgtattacagaggagctgcagctgctatcattgtgtatgatattacaaatcaagcatcatttgagagagccaaaaaatgggtccaagaacttaaagcacaaggcaatcctggtatggtaatggcacttgctgggaacaaagttgatttactagatgcaaggaaggtggcagcagaggaagcacaaacttatgctcangagaatggcttttcttaaggaaaca

SEQ ID NO: 3841 - DNA, 334 bp, Gossypium hirsutum
  Clone ID: LIB3493-021-P1-M1-D8
atggtcaccatttgatggaaaaacaatttctccaaaattttctccttcgttttccatgtttatggttaaaaacccggaaatagcgagtgaagcctctcaaagtagataaatataaaataattgcagtagttgacatttcgagtagcaatggctcctggaggcagcgcttgcaaagaagtcattgaatctcattcccctgttgcagattatgacatagcttcagcaaaatctgagagtaataatgccactagtactactacaacaacaacaatgaaaacttcagttaatttagttggaaaacatggaattcattcaaaccaacgggtttatgagc

SEQ ID NO: 3842 - DNA, 436 bp, Gossypium hirsutum
  Clone ID: LIB3493-021-P1-M1-D9
gggaggggcaggggatataacgtcagtgtccatcaagtgttccaaaacaggatggctacctatgtccagaaattggggccaaaactggcagagcaatgcttaccttaacggccaaagcctctctttcaaagtgactgccagcgatggcaggactatcacaaactacaatgtagtgcctgctggttggcaattcggacaaacttttgaaggaggccagttttaagacaatattatagtgtctgtctaatattaaaactggaattgacatattacttatataaggcacatgagcgttttatgccgaggtagtaaagtggcgcccgctggctttatgtgtgaaataggcgagcaagtgccattagcctataatatatacatttcttataagtgaaccaaactataagtttgaactctagaagtgatatccataatgtct

SEQ ID NO: 3843 - DNA, 326 bp, Gossypium hirsutum
  Clone ID: LIB3493-021-P1-M1-E1
ggttactgagaaggaattgagggattccaattggtattctaatatggaatctgcttctaaggatgttgagcttgtcgctaatggaggggttgctcaaaaagtgtttaacatgaagaaggcaaggggctggaaaaatgtgtggagtatgtgggtttgatatataggcgaaaacaaagtgatttcggagatgaggataggagtattggaggagatgtaggtaaatggaggctaaactgagtcgttgcacaagccttagaagggtgactaatggagatgaatgtaaaggtgttagaagaaaatgtgggtgaaggaacacctgcagactc

SEQ ID NO: 3844 - DNA, 460 bp, Gossypium hirsutum
  Clone ID: LIB3493-021-P1-M1-E10
cggacgcgtgggaaaccctccaactggaacctttgtcaaggttcacaagtcggggtcctttgggcgctcattggatatttccaagtttggcagctatgatgagctgcgctgtgagcttgctcgactatttggccttgaaggccaattagaggaccctcagagatcaggctggcagcttgtatttgttgacagggagaacgatattcttctccttggtgatgacccatggcaggaattcgtgaacaatgtgtggtatatcaagatactatccccacttgaagtacaacaaatggggaaaggtcagaatcctgctacttctattccgaaccaaaggcttaacaccaccaccaccgctaccaccagcagcagcaatggcaaccactgcgatgactacatgagcagacaggacttgagaagttctgttgcatcaatggggtctctggaatactaaatgaaaatc

SEQ ID NO: 3845 - DNA, 356 bp, Gossypium hirsutum
  unsure (1)..(356): unsure at all n locations; Clone ID: LIB3493-021-P1-M1-E11
gaaaaaaagagagatggcgtctgtaataaaatctgcaatcttaattctgtcggtgtttttatctgtacgcttcagttcgggtgttaggttgctccaggaacagcccaatgatgaccccaaaaacatggacgctattcctcccattgatgcactcaaccctaccgagttgaatggacccggtgttggcattcacgaagatcatgttgtcccaaaaggtgctgaaattggtactcttggttttggttttgaaggtggtcctgataaatgttgttcttctggatgttccggtaattgtaatcctggtggtttcgttctaccatttcctcanattccagaaatcccaagaattccagaaa

SEQ ID NO: 3846 - DNA, 381 bp, Gossypium hirsutum
  unsure (1)..(381): unsure at all n locations; Clone ID: LIB3493-021-P1-M1-E12
gcatacttagctgcattctctattggaatccacatcagtctttcatggcttttgactgtgaaactcaagtacggcctctccggggctttactatcaacgattttggcctattggataccaaatataggtcagcttttgtttattacatgtggaggttgtaaagatacgtggaaaggtttctcaatgttagctttcaaagatctaatgcctgttgttaagctatctttgtcatctggtgctatgctntgtcttgagctttggtacaacacaatcttggttcttctaactggaaacttgaaaaatgctcaggttgcaattgatgctcttgccatttgtctcaacattaatggatgggaaatgatgatatcgctagggttcttg

SEQ ID NO: 3847 - DNA, 399 bp, Gossypium hirsutum
  Clone ID: LIB3493-021-P1-M1-E2
tccttcaccagttccgtccctgagaggtccgcctttgtctccgaaaatctcaccgagtccgttatcgacatgcgtctcggcgaactggctgccaaaagcaacgctaaatctgttacgtctgagtccgaaaacgaggcctttttggagatttctcaagcctttagtgatttctccgcttgtagcagcgatatctccggtgagttgcagcgccttgcgagcttgccctcaccggaaaactctttgatgaatgagagaaataacggagtccagtcagagccggagccggaaccgtgccatggctttttgcagagggagaacttctcgactgaaattattgagagtatctcaccagaggaccttcaaccgacggtcaagatctgcatcgacggcctcgaatca

SEQ ID NO: 3848 - DNA, 460 bp, Gossypium hirsutum
  unsure (1)..(460): unsure at all n locations; Clone ID: LIB3493-021-P1-M1-E3
ccaaagccagcactctgtatctagtagctctgaaaaataccgaacaaaagctagtgatctatcgcccttcaatcctaatcagcaagttggagatgttttgggagcaagagaacctgtggcgaatgtgggcaacattgaggtgtgcactaactctgcattgaggcaaaagaggcaaagcgttgatcttgatgagctattagcaaattcacctccctggcctcccgttgtcagtcctgcccaaaacttcagggatgatgagaaagaattaggctcgggtgagtgggtggataaggttatggtgaacaagcaagataccattaacagagtgggaagccctctaggatgttgggaagcagaaaatgggaacttgtctgatgtcttttaccagaaatatctncacgattctttaaagatttatccagaaaaatcatataatatgttcttgggggctaatggattc

SEQ ID NO: 3849 - DNA, 472 bp, Gossypium hirsutum
  Clone ID: LIB3493-021-P1-M1-E6
aagcctggcaaccacaatttcgagctcctgaagaagctggtccttcctgatggatcagttctccgcacccaattgcctggcaggcctaccgttgactgtcttttcgctgatccggctagagacgggattagcttactcaagatttggaatgtaaacaagtgttccggtgtggtgggtgcttttaactgccaaggtgctggttggtgcaaggtcaccaagaaaacccgaattcatgatgcatcacctggtacacttacaggttctgtttgtgccaacgatgttgattcgatcgctcaggttgccggtgcggactggaacggggagagtgtggtttatgctcatagatcaggagagctggtacggttacctaaaggtgcttcagtgccggtaacacttaaggttctcgagtatgaactattccacttctgtcccgtcaaggaaatttccaacacccatttcatttgcaccaatc

SEQ ID NO: 3850 - DNA, 450 bp, Gossypium hirsutum
  Clone ID: LIB3493-021-P1-M1-E7
cggacgcgtgggcggacgcgtgggcggacacgtgggcgaatctcttggagctagcctccggtgaggctccatctttaggccgaattagccgtaggattccccggattatgacggtcccggggatcatttccgatatcgacgatgatccatcagagagtgtatgctctgatccatcctcctcctccacccagaaagaccgaattatcatggtagctaatcagctgccgataagggcacataggaaatcggataataataaaaatgggagtagcagcagtagcaccaccaccaccagcaataattggattttcagctgggatgataattcacttctccttcaaatgagagatggtttaggagatgatgatgttgaggtgaattatggttggtgtttaaaggaagaaatccacccaaatgaacaagatgaggtctcccagattcttttagaga

SEQ ID NO: 3851 - DNA, 356 bp, Gossypium hirsutum
  Clone ID: LIB3493-021-P1-M1-E8
gaatactaaaaaaaatccctaaaaatcaaaaagccgaagcagctgatttcgctaccgctactgctattgcttctgctttggcgcagttcaccagggtttcttttgaaccccccccccccaaaaaaaaaaaacacacacacacgatgtctcgcgtgtacgtgggtaacctagacccacgagtttcggagcgggatcttgaagatgagtttcgtgtctttggagttattcggagtgtatgggttgctcggaggcctcctggttatgctttcattgactttgatgatcacagagatgctgaggatgccattcgtgaattagatggcaagaatggctggagagttgagctttctcataac

SEQ ID NO: 3852 - DNA, 350 bp, Gossypium hirsutum
  unsure (1)..(350): unsure at all n locations; Clone ID: LIB3493-021-P1-M1-E9
tccacgcgttcgnccacgcgtcccggggggcatcatatacctttgctcaccatgcaaaaactatccatccatgtttgatgcatacagttaattatcatgagctcaaaacaactctttaaacgcaccaggtatcaataaccattttttttctcctaaagatctggacatgtttctgcctattgttatcattggtaggatcattaaaaatgttttttcttttaacgcttagatatacatattagctttttttacttttttagattttttatttttgttattcttcttattattttatattatttttatttttatatttatgattagatgtattttatttaatttttttattt

SEQ ID NO: 3853 - DNA, 339 bp, Gossypium hirsutum
  Clone ID: LIB3493-021-P1-M1-F1
gaagactgagggtggaattttgctaccaacaacagctcaatcaaagcctcaagggggtgaagtggttgccatcggcgaggggaagacaattgggaagaccaaattggaatgttctgttaagactggtgctcaggttatatattccaagtatgccggaaccgagctggagttcaatggttcaaatcatcttatcttgaaggaagatgacattgtgggaattcttgaaacggatgatatcaaagatctcaagcctttaaatgacagggttttcattaaggttgcagaagccgaggagaagactgtgttgaggttgttgctgactgagtcaagcaaagaaaa

SEQ ID NO: 3854 - DNA, 412 bp, Gossypium hirsutum
  Clone ID: LIB3493-021-P1-M1-F10
ccaaaagcaatatggtaagcttttgaaggacttcaacaaagggttggacaactacaaggagatccaagagctgaaggttgatgttgagaagttcgcatcctcattcgatatgcctggcttcaagatgtccgaaatgaagtacaaggattagatctaaataaccatacgatctaattgatgttattatcagcatctgccactttttgggttgcccccatttgatgtcttatgagtgaaaggaaaaagaaagggaaaagagaaggatgcaaatgccttccacgtagtacggttttaagtgtcttcatttactggtcaatttgatatgatatttgtcaagtttttgctgttctgtctttataagagtttgcataaaacgtatgtactaattttatgcattctttatggttgctag

SEQ ID NO: 3855 - DNA, 468 bp, Gossypium hirsutum
  unsure (1)..(468): unsure at all n locations; Clone ID: LIB3493-021-P1-M1-F11
ctcagttatggaggacagatatgcacatatattggaataggatatggatctccaactctggcatccgccatggctgatcttactccagccttcactttcatcttctccatcatctctcggatggaaaagctggacttagggatcaaaagcagccaagccaagtctttaggaactttggtatcgatcacgggggcatttgttgtgactttatacaaaggccttccactcaccacttctccaaggaagtacagctttcttcaccaagttcttgggattcctcactccaactggatcattggcggctttttcctagcctctcatagtgttatcttcgcaattattcttaatgttcagacgtggataataaggagatacccagcagagatgctagtaacactcatttgcagcatcattgtggccatcctatcctctngtgtctctttgatggtagagaaggacccaaatgct

SEQ ID NO: 3856 - DNA, 390 bp, Gossypium hirsutum
  Clone ID: LIB3493-021-P1-M1-F12
cgagctaattgggagagtcttgaaggtaaaaaccgaagaaacaaagcgctctctctttgtgaatccaatcaaatcgaagatgttgagagtggcaacgaggcggctcacttcttgttcgtctgcgtggaggtcgcaccaggccacctccgctatcgcctctcgtcctttcatcgacggctccgattcttctgattgtctcagatccaatttctcctcctcctcattttccttctctttcgcttctcaattccttcttcccaccagaggttttgcttctgagtcactcaccccaaaaagtgaccacagtgtgattcctgatgttccagcaacagtggctgctattaagaaccccagttctaaaatagtttatgatgaatacaaccatgaacg

SEQ ID NO: 3857 - DNA, 446 bp, Gossypium hirsutum
  Clone ID: LIB3493-021-P1-M1-F2
gtctaaaactaagaccatggatgccctctccactattgatttacaaggagaagccgctaaagttctaaccccaaagcatttctctacaatgtggccttttgcgtccatcaatggttccaatgctaatttaattggttttgagagactgctatcgtctgtgctggattcaaaggcaaacaagaaaggatactttaagttactgaaggctgatgtgtcagctcaaacatttgtgaagattggttttgggatcgagaagaagttgaaagaaagagatgggtttaattttgagggctttccagagtggaggacaaagcctgagatagtgagtatgcatttttgggtactggctaaggttgatggcgagactgttataccggagagaatcaatgcggttaaccctggtgctggtgaggatgcaattgcaacaactgtgctagcaaggaaca

SEQ ID NO: 3858 - DNA, 461 bp, Gossypium hirsutum
  unsure (1)..(461): unsure at all n locations; Clone ID: LIB3493-021-P1-M1-F3
ggattgtgctcctcatctcaatattaatcttcaaatgaactattggccatccctaccttgcaaccttaaagagtgccaggaacctttgtttgattttatttccagtctagcaatcaatgggagtaaaacagcaaaagtgaattatgaaacaagtggttgggttgcacatcaagtgactgacatatgggcaaaaacatcaccagatcgaggtgaggctgtatgggctttatggccaatggggggagcatggctctgtactcatttatggnaacagttcacctatacaatggacanagattttctaaaaaataaggcatatcctttattaagaaggtgtacatcatttcttctggactggttgattgagggccccggaggctatctggaaaccaacccatcaacttcttccgagccatatgttgtgctcctgatggcaagcctgcctacgtaagctactcgtc

SEQ ID NO: 3859 - DNA, 473 bp, Gossypium hirsutum
  Clone ID: LIB3493-021-P1-M1-F4
ccttcactcagcagcggctccccccctcccccccgccttttccccttaaccctcaaccgcaaaaaagaaaaaaagagtagcagtaccggtttcaccagctatgggtatcgacttggtcgccggcggcaagagcaagaagacgaagagaactgctcccaagtctgatgatatatatctcaagctccttgtcaagctttaccgttttctggtaagaaggactggcagcaaattcaatgcggtgatcttgaagcggctatttatgagcaaaaccaacaagcctcctttatctctttctaggttgattcaattcatgaagggcaaggaggataagattgctgtggtagtcggggctgtcaccgatgacattcgtgtgtatgaagttcctgcgctgaaggttactgcgttaagggtcactgaaacggccagggcaaggattgagaaagctggtggggaatgtttaacatttgaccaac

SEQ ID NO: 3860 - DNA, 465 bp, Gossypium hirsutum
  Clone ID: LIB3493-021-P1-M1-F5
cggacgcgtggggtgagttaggggtgacaagatggctacaagtgaggcatccgtgactcggataatggtggcggtgaatgagtcaacgatcaaaggttaccctcacgcttctataagtagtaagggagctttcgagtggactcttcagaagatcgttatgtccaacacttctggtttcaagcttctcttcctccatgttcaagttcccgatgaagatggtttcgatgacatggacagcatatatgcctctcctgaagatttcaagagcctgaagagcagggaccgggctagagggcttcatctgcttgaattctttgttacaaggtgccatgaaattggggttgcgtgtgaagcatggatcaagaaaggtgatccaaaggaagttatctgccatgaagtgaggaggatccagccagatcttcttgttcttggtagcagaggactgggtcctttccaacgggtttt

SEQ ID NO: 3861 - DNA, 422 bp, Gossypium hirsutum
  unsure (1)..(422): unsure at all n locations; Clone ID: LIB3493-021-P1-M1-F6
atcaaaccacatcccacagacatgggtgcccacgaagaagaagccggaggtgaagagtacttgtttaagatcgtgctgatcggtgactcagctgtgggaaaatcgaaccttttgtcacgttttgctaggaacgagttcgacaataactcaaaggcaactattggagtagagttccaaacccaatgcgtggaaattgatgggaaagaagttaaagcacagatctgggacaccgctggtcaagaaaggtttcgagctgttacttctgcttactatagaggagctgttggtgctcttattgtttatgatattactaggaggagtagctttgacagcattaaacgttggcttgatgaacttaccactcattgtgatactacattgacaagaatgctggtggngaacaaatgtgatttggagaacat

SEQ ID NO: 3862 - DNA, 464 bp, Gossypium hirsutum
  Clone ID: LIB3493-021-P1-M1-F7
atcgagttcaacttcagctagaatgtcttggacaggaacatgtaggttacaaacgtctggactttcctttactaaagctcagtattgttggtggacggccattttcatgtggtggtcaacaaatatttaggaaaaggcttctgtctgcaaggtatggaatccaagatatggaaggaagtgccaagagaatctatgaagctgcgcttgggaccccagaagatcatctagttatacttcttgcacataatggatccacaggtcttggcagtgaactgaatgacatttgtggaaaagactgggtgtttggtggtggtgatcatggtgatccagatctagcacaagccatctcccacttgaaagagactactaacgtctccattccactacttgtgtttggtcacatgcataaggaattggcacatgggaatggtcttcgtaaatgattgtagtccgggctgacgaca

SEQ ID NO: 3863 - DNA, 363 bp, Gossypium hirsutum
  Clone ID: LIB3493-021-P1-M1-F8
cccacgcgtccgtgttggttcacttcgatatgctcttcatctcagatttctatgcccttctcccaaaaaaggttccaagtcatttctgagatgtaaatctgatcctgggtcagttcctcaaaagactagcattgaaaaggatggggatcggagattctatttatacaatgacttgagggttgtgttccctcaacgccattcagatgctgatgagggcaagttgaacgtggaataccattatccagaagatccaagatacttcgatatcagcaactgaatcatctaatttacacccaaaaagcaagctttcttttgctgactttgtacataaatagttactggatgtttcatttcagtcatctc

SEQ ID NO: 3864 - DNA, 421 bp, Gossypium hirsutum
  Clone ID: LIB3493-021-P1-M1-F9
ggtgactcagtgttgcttgtccaaccatgcaaacaaggggcaggaccaataccttgctaatcttgctctgaaaatcaatgctaagcttgggggcagcaatgtagagctgaatgaccggcttccccatttccatggtgaaggtcatgttatgtttattggagcagatgttaatcatcctggttctgataataagactagcccatccattgctgctgtagtagcaacaatgaactggcctcaagctaatcgttatgcagcaagggttcgaccccagttccatcgcaaagaacagatcctagagttcggtgaaatgtgtttggagcttgttgaatcttatgctcgtctaaataatgttaaaccagaaaaaattgtgctcttccgtgatggggttagtgagggtcagtttgatatggttcttaat

SEQ ID NO: 3865 - DNA, 359 bp, Gossypium hirsutum
  Clone ID: LIB3493-021-P1-M1-G1
cggacgcgtgggttacaacccaatgctagttccagagggtcacgataggatggatgctgacctggaattccttctccattatttgaattgtttacttctaaattagatatctgttgcttaagaatccaacgactgtaccagaaaaaaaagagtcaaattctatgaagatataaaaaacacatacaccccacaaaatagatatataaacagctgaaaaggcactaattgtattttctagcagcctattgtcgcatttgagatcaatgtattaacttcatgggttttttggaagataggagtttctgccctgcaaaacccaattaataaacatgtgaaaataagcgtttagaatatctaaa

SEQ ID NO: 3866 - DNA, 184 bp, Gossypium hirsutum
  Clone ID: LIB3493-021-P1-M1-G10
attacatgtttgctgcttgtttttattactcggacttgggtgcgatgtttttaattttttccttctttttctcgaattgcttctatcattgctgtgtgtaaattagccatgtttgtaagtatttctcggaatcttaccgtttattgtttaattagcaaatgaaataatcccgtatttgaatgtt

SEQ ID NO: 3867 - DNA, 468 bp, Gossypium hirsutum
  Clone ID: LIB3493-021-P1-M1-G11
gtcagcatttctcaatgtgtattcccagctcaaatcggagctccttcaggatccttctttcgagtttaccgatgattctcgtcaatgggttgaacggatgctggactacaatgtgcctggagggaaactgaatcgtggactctctgtgattgatagctaccgcctgttgaaagatggaaaggaattgacccaagatgagatttttcttacaagtgcgctcggttggtgtattgaatggcttcaggcatattttcttgttcttgatgacatcatggacagctctcacacccggcgtggccagccttgttggtttagattgccgaaggttggtatgattgctgtaaatgacggtgttatacttcgcaatcacatcaccaggattctcaaaaatcactttcgtgggaaaccttactatgtggatctgctagatttatttaatgaggtggagtttcaaacagcttcaggaca

SEQ ID NO: 3868 - DNA, 459 bp, Gossypium hirsutum
  Clone ID: LIB3493-021-P1-M1-G12
atgattttcattcttgtttactgcaccgccggtatctcaggtggtcacattaacccggcggtgacatttgggttgtttttggctaggaaggtgtcgttaataagggcggtggcttacatggtagctcaatgtttgggtgctatttgtggtgttgggttagttaaggcattcatgaagagtgaatacaactcccttggcggcggtgctaacacggtggcgactggttataacaaagggactgctttaggagctgagattattgggacattcgtgcttgtttacactgttttttcagctactgaccctaaaagaagtgcccgtgattcacatgtacccgtgttggctccacttcctataggatttgcagtgttcatggttcatttggctactattcctatcaccggaactggtattaacccttctagaagcttcggcgccgccgttatttacaacaacgac

SEQ ID NO: 3869 - DNA, 420 bp, Gossypium hirsutum
  Clone ID: LIB3493-021-P1-M1-G2
gaggaattcgacagcgtgcatggggtaaatgggctgctgagatccgagacccgaggaaaggggttagggtctggctccgaactttcaatactgctgcagaagctgcaggagcttatgattgtgaggcacgaagaattcagggtaagaaagcaaaggtgaacttgcctgatgagatgccacgcacctctccaaaacctgtgattaagacagatgatgacaaaccactccccatgtcaaattcgagccctgttgaaccaaatatcaaccagaatttcaattgcttgaacaaaccagagcatgtcttttatgataccatgggattcgttgaagagaaggcaccaatggatccatttgcttatgtgagacactgttcctgctgctgttgatgttggattgaaaccctatgggcaatctgacaat

SEQ ID NO: 3870 - DNA, 431 bp, Gossypium hirsutum
  Clone ID: LIB3493-021-P1-M1-G3
gggagtttaaagcagcaatatggtctggcaaagtcggcaaatgaagtgattttggtcattgaagcttacaaggcccttcgtgaccgagcaccttatcctccaaaccatgtggttggccatctaattgggagctttgctttcattgtctttgacaaatccacctccactttgtttgtggcttctgatcaatttggtaaggttcctctctattggggaatcaccgccgacggatatgtggcctttgctgataatgctgaattgctgaaaggtgcctgtggcaaatctcttgcttcttttcctcaaggctgtttctactccacagcagtaggaggattaagaagctatgagaatcctaagaacaagatcactgcagtgcctgcttgagaagaggagatttgggtgctaaattcaaggtggagggccaacagttg

SEQ ID NO: 3871 - DNA, 465 bp, Gossypium hirsutum
  Clone ID: LIB3493-021-P1-M1-G4
caagctcaaaaggaagcacctactgatatgcaatgcaaagataagtttttacttcagagtgtggttgctagtcctggagctaccccgaaagatataatggcggagatgtttaataaggaatctgggcataatgttgaagagtgcaagttgagggttgtttatgttgcacctcctcggcctccttcccctgttcgagaaggatctgaggaaggctcttcacctagggcttcagtctcggacaatggtagctttaatgctgctgaacttacatctgtgtctagagctcatgttgagtggcatgaaactcaagacaactcatatgatgcaaggaccctcatttccaagctaactgaggagaaaaactctgccattcagcaaaatagcaagcttcagcaagaactggaactgttgagacgcgaagccaaaagaaaccaaagtggtattccattcatttatgtatttctt

SEQ ID NO: 3872 - DNA, 408 bp, Gossypium hirsutum
  Clone ID: LIB3493-021-P1-M1-G5
cttggtgtcaagcaaatgatttgctgttgcaacaagatggatgccactacccctaaatactcgaaggctaggtatgatgaaattgtgaaggaagtctcttcctacttgaagaaggtgggatacaaccctgacaagattccatttgttcccatttctggttttgagggtgacaacatgattgagaggtctaccaacttggactggtacaagggccctactcttcttgaggctcttgaccagatcaatgagcccaagaggccttcagacaagcctctccgtcttccacttcaggatgtgtacaagattggtggtattggaactgttccagttggtcgtgttgaaaccggtgtcttgaagcctggtatggtgtgacatttggcccttctggtctgacaaccgaagttaaag

SEQ ID NO: 3873 - DNA, 449 bp, Gossypium hirsutum
  Clone ID: LIB3493-021-P1-M1-G6
cagacaaggaggagccagttgtaatcgagagtcctggagtggccgtagcggaagagaagaagcctgacgatgcgggggaaatagagagcttgaagaaagctttggtggattcgttttatgggacggatcgtggcttgaaagctagcagtgagaccagagctgagattgttgagcttataactcagctcgaggccaagaacccgactccagcaccaactgaggctttgcctcttctcaatggcaaatggattctcaagtacacatcattcccgggtctgtttccactgttgtcaaggggtcaatttccattagttaaggtggaggaaatatcacagaccattgatgccgaaagtctcactgtgcagaactctgttcagttcgctggaccattggccttaagttctattagcaccagtgctaaattcgaggttcgaagccccaaacgtgtg

SEQ ID NO: 3874 - DNA, 426 bp, Gossypium hirsutum
  Clone ID: LIB3493-021-P1-M1-G7
caaacacgcaccttttctttcctttcccatttttgtccatactacaacgactcttggtggaggaccctttttctctcttaatattcgtcttgataagtagggtaggccatgtgagtaacgcttgggcagggataaggatattggtcctgttagtgtgcagaagatgggaaaatgcaagggttgtgggaaattagggaggatgttgccaagagatgggcctgtgaatgcttactattcatctctactgtgttcccctgttgtgtctgtttgggattgcattgtccgcaagatgagatattcctatagacctgagtgggtgtagtagtcttggtgttatattagttcgtaataagacaataaaattagaaataggtacatcaaaacttctattttaaggaaaaggctaaaaagtaaaaaagagaaaag

SEQ ID NO: 3875 - DNA, 420 bp, Gossypium hirsutum
  Clone ID: LIB3493-021-P1-M1-G8
taaatccctcaaatggaacccaaataatttccatttcccacttttcgtattccctgttcttcttcttcatcttcaaacccacaaattttttttaacaaaaatcttatatagtgatagtgcaggcgatgaatctttggtcggacgataacacgtcggttatggaatcttttatgagctcagacatatctgctttatggccaccaccaccacctccgccgccgccgcagcaatctcagccgtccgttcctctcaaccaagactcgctccaacaacgtctccaagctctcctcgaaggtgttcgtaattgttggacttacgctattttttggcaatcctcatacgattacgccggcgccgccgtgctcggctggggagacgggtattacaaaaggggaagaagataaggagaaagcaaagtca

SEQ ID NO: 3876 - DNA, 428 bp, Gossypium hirsutum
  unsure (1)..(428): unsure at all n locations; Clone ID: LIB3493-021-P1-M1-G9
tccgaaaaacattttccgaaattttcggtgtttgttttgtgtaaaatgaattcccataggaaaacattttacaaacacgggtaaaatcaaaagcaaattttggaaattgtcttaccgatttctaatccgtaagacattttccctcttctcttctaagtagttgttctcccttttcctccgactcctcatctccgttcgttggcctcaccgcaccatctttgcatcgtcgtctctgtcggtcgaccgtcggccttgcctctgtattctgaagaaaccctaaaacattagggtccacagtcgagaaaaattcatctctgatctcctcgagagagttaaggcattgcatattcgggacatggatgttgtagttgagcccggaattggatggatggaacttaatgaatacttggagccatatggnttatttt

SEQ ID NO: 3877 - DNA, 423 bp, Gossypium hirsutum
  unsure (1)..(423): unsure at all n locations; Clone ID: LIB3493-021-P1-M1-H1
caggcatcagttcttaagaaattcccagctgagctttttgttgtcttctattattgcttctttgtcacccttcaatcgggaataatctgtttgatcatgggaggagatcttagtgcttggagctttaaacctgatgtgagattnggtgctgttatatactcagctgtgtttggctctgcattccaacttggggtttctacctggtgtatgcatcggacgggtcctgtttttgtttccatgttcaagcctttgggaattgttgtttcagtagtcattggtgttatcttcttaggggatacatcctttctttgaagtttagttggtgcaattgtcattgttactgggttttactcaattatgtggggaaaagcaaaagaaagggagttagacgtgcaaacttaaggggatgatgtcagaatcaag

SEQ ID NO: 3878 - DNA, 470 bp, Gossypium hirsutum
  Clone ID: LIB3493-021-P1-M1-H10
agttcattttcagccttcctatttgttcttctggctattttgatcaccttgggtgaacaaggtgtagcagctggccgatggtggtatccatcatcgccaccacctccgccgcaaaatggttgggtttggacatggccatggcctgtgtatagctatccaccacccccaaccgccgtaaagccaccttcacatcatggtcaaaaatctcctcctcttcctcctcctcctcctccttctccgcagccaccgatggttaatggcaagtgcttgggaacaaccctggcgagcaaactaacctgtcttcaagatgtcataagttcgatcctgatgtttagaccttacgttagtccagaatgttgcgctgctgttcaagcgactcatgaagattgcttgaacactattttcgacgagtttaataatccattcctcgctcctctggttcaacaacaagtgtttcaaacacccaatcc

SEQ ID NO: 3879 - DNA, 467 bp, Gossypium hirsutum
  Clone ID: LIB3493-021-P1-M1-H11
gtggctcctgattggctcgatggaagcttggtgggtgattacgggttcgacccgttcgggttagggaaaccagcggagtacttgcaatatgatttggattctttggaccagaacctggctaagaatatggctggtgagatcattggaactaggaccgaagttgccgacgtgaaggcgacgccgtttcagccttacagcgaggtttttggtctacagaggtttagggagtgtgaattgatccatggacggtgggccatgttggctacgcttggtgcacttaccgttgaatggcttactggtgttacatggcaagatgctggcaaggttgagttagttgagggttcatcgtatctcggccagccccttcccttctcgatgacaacattgatttggatagaagtattggtgatcggattcatcgagttccaaaggaacgccgagcttgaccctgagaagaggttgtaccc

SEQ ID NO: 3880 - DNA, 466 bp, Gossypium hirsutum
  Clone ID: LIB3493-021-P1-M1-H2
attgaattcaaacagcaagttaccatttggtgggccggtcttatgcgaggtgctgtctcaatggcacttgcttataatcagtttactagtttaggtcatactcaagtgcgagggaatgcgatgatgataaccagcacaatcacggttgttcttttcagcacagtggttttcggattgatgactaaaccattagttaggatcttgcttccttctccaaaacatctctcgagaatgctttcgtccgagccaactactcctaaatcattcttcctaccacttctcgacaatgggcaaggatctgaggctgagcaaggcaaccgaagcgtggtccgcccatccagcttaagaatgctcttgaccactccttcccacaccgtgcactattattggagaaaattcgatgatgcctttatgcgacctgtattcggtgggaaggggttcgtaccatttgttcccggatcaccca

SEQ ID NO: 3881 - DNA, 410 bp, Gossypium hirsutum
  unsure (1)..(410): unsure at all n locations; Clone ID: LIB3493-021-P1-M1-H3
gaaaaaaagagagatggcgtctgtaataaaatctgcaatcttaattctgtcggtgtttttatctgtacgcttcagttcgggtgttaggttgctccaggaacagcccaatgatgaccccaaaaacatggacgctattcctcccattgatgcactcaaccctaccgagttgaatggacccggtgttggcattcacgaagatcatgttgtcccaaaaggtgctgaaattggtactcttggttttggttttgaaggtggtcctgataaatgtntgttcttctgatgttccggtaattgtaatccctgtggtttcgttctaccatttcctcaaattccagaaatcccaagaattccagaaatcccacanatcccacagatcccacanatcccacanattccactaatcccacaga

SEQ ID NO: 3882 - DNA, 352 bp, Gossypium hirsutum
  Clone ID: LIB3493-021-P1-M1-H4
ccaatgtgtacgttttggatctcctctcgctgccattgctccgattgtcccctccggcaatggctatcgattctgattctttcaaacaatcacttctccctagcttcctttactcttctgctcccaactctttctctctggatcgactcctcaacgccaacagccctgctttctctgcttcgcgctccactatacccgatgctactgcggcctctatctggccatcgataaaggcgagaactttcatgatccccttccccaatgaccccgagaagaagatcgagatgtattcgcctcagttctacgctgcttgtacctttggcgggatccttagctgaggtctcactcacat

SEQ ID NO: 3883 - DNA, 395 bp, Gossypium hirsutum
  unsure (1)..(395): unsure at all n locations; Clone ID: LIB3493-021-P1-M1-H6
tttgaacaggaacgagctgagggagttggaattgagctaaaatcagcttgcaccaagatgcaaggagtcttcaagaagttggcttgagcttctctatcatccataagctgattctccttacaaagtctaagtaatagagctaaaacagcttcacgaaggcgttgagatcgagcttgagtcattggtccttttgggatctcaatggaatcatggatgggacttggtagtgttggggtcatggtcacatcaatctaacaaaggccgaaagcatgttgtgttcgaaccggnggattgggtttggtgcatatgcgcaaggaaagatttcctgcgcaaagatgatctaaacttcttccgggaggagatggaccattccaagtccttgagcgaataaatat

SEQ ID NO: 3884 - DNA, 382 bp, Gossypium hirsutum
  Clone ID: LIB3493-021-P1-M1-H7
attgcatctttgattttcgttaaagactgtaattcagggtcgcgaatcgaagactcgcaacaaatcgacaaaattgaagcacgtttaaggaatgttttgaaaggagataacgatattcgtagcgcgaaaaccacggtttctatggccgtaactcataccgaaagaaggttgcatcaaatgatgttcgcagatcgtgattacgaacggaaaccgattttggaacataagtcggagttgtcggctgtcaccgtgcaaaactgggtggaaaggggttattctgttgtgaatgttcaatgcaaggaccgaactaaacttctgtttgatgttgtttgcacattgacagatatgcaatatgttgttgtttatgctcactatcaaaaca

SEQ ID NO: 3885 - DNA, 331 bp, Gossypium hirsutum
  Clone ID: LIB3493-021-P1-M1-H8
agaatctgctcctgaacttgataacgttgcttccgagcctgcaaccaaggaggatggaagcaatatctctgttgctaataacattgcagatgacagtgaaaatggatcagaagaagctgctcctgaactcgataaggtttcttctgagcctgcaaacatggaggacagaaacagtatctgtggtgttcataatgttgcacatgatgacaatcgtgaagaaaccgttcctgaacatgataaggtttcgtatgtcaatactgaaaagtctggagaaacaaagggtagtaagctaatagcattagcggaaccgttcaatcctggaacactctac

SEQ ID NO: 3886 - DNA, 462 bp, Gossypium hirsutum
  Clone ID: LIB3493-021-P1-M1-H9
cggacgcgtgggcggacgcgtgggcggacgcgtgggcggacgcgtgggcggacgcgtgggctttattccctcgttcattttctttgtcttccttatttgtcgatctcgatcgagggatcgcgttgtccttgatgatcgcttgaagaatcgataagaggggcgtcgattttctgttaattattggtggaaggaaatagaagcttaaataaatttcgcccacttaagtttttttcttttttggcggcggttaacttgttaaggttttgggtaaaaggggatttttcttttcaaaagatcgagttgtttttagttttaatgatgttagccttaactgctgtgttttgaagtgctatggaccttgttgtacaccgcaattaagatgacgctttacattggtctctaatctttaaagttatggaagagaatttgtttatagacaactaccgagattaaccttttttt

SEQ ID NO: 3887 - DNA, 84 bp, Gossypium hirsutum
  Clone ID: LIB3493-022-P1-M1-A1
tgtcagacccctttttttgttggcggggattaaaggattttagctttgttcaattttcaggtggagattataaaaccttagtat

SEQ ID NO: 3888 - DNA, 97 bp, Gossypium hirsutum
  Clone ID: LIB3493-022-P1-M1-A10
acacactactatagggaaagctctacacctgcacgtccgatacctcaatttccacctagacctacgcgtccgattgatagttaacaatgatttaaaa

SEQ ID NO: 3889 - DNA, 110 bp, Gossypium hirsutum
  Clone ID: LIB3493-022-P1-M1-A2
gcataagctgcacctttaggatgatgctgtcaagtcatctgagtctggacaggagatacatagccaagagatgctactacactggtacactcttaccttcatgatgacgc

SEQ ID NO: 3890 - DNA, 273 bp, Gossypium hirsutum
  Clone ID: LIB3493-022-P1-M1-A3
cgaatgccggcgccaagtatgtggcttacaactatcaggaccttgtgtttgcgccgtacggaccgaggtggcggctgctacgtaaaatgagctcccttcatctcttctccggcaaggctttggacgactttagacagattcgcgaggaggagataagagtgttggtacgagctttggcaagcgctaaaacaaaggtgaatttagggcaacttttgaacgtatgcacagtgaatgccctggggcaagtgatgatggggaaaagggtgttcggag

SEQ ID NO: 3891 - DNA, 326 bp, Gossypium hirsutum
  Clone ID: LIB3493-022-P1-M1-A4
gtcgaacgctgcattaaaatagattctcgtactcgtaccataacatccatagagcgtagcagaaaagtagacattgaccgttgtcgcttctcttgaagacccagagggcattcgcgaaaaacatggacactttcttcaaccgccgaatagcatcgaggacatctatcattgacagtaaccctcctgtatctaagattagcaaaattaagaataaaatcccatgaaattcgccagattgtaaatgtaatttttgagggcaactgtaagctccaaagtttcttgtaaaattcttttaattcggtctgtaataaataatcattagggac

SEQ ID NO: 3892 - DNA, 216 bp, Gossypium hirsutum
  Clone ID: LIB3493-022-P1-M1-A5
gagacgcttgagtcatacttcaattattcaaactaaagtctatccttaatccaatcgaacggatttaagcccattaaatccgccatttccaattataacatccgtatggtatcatccgttatccaagcttaaaatcacaagaaaactcctatcttccaacccctagcaaaatagggattgagccaaaaaactcgttaacgaccctaacgactactt

SEQ ID NO: 3893 - DNA, 271 bp, Gossypium hirsutum
  Clone ID: LIB3493-022-P1-M1-A6
gagaaaggttttattcctttgcctgattagagacatggagaagtggagttttatgctagttattgcattagttgttgttcacgctagtgcaagaaatgtgcccacaactacaactgtgcccactagcactactcgcagtagtgtaccaagtggtgctactggtgttggcgaccaaaagaacttcctcacttacggtggcgttgggggctactctggaattggttctaatggcttgccatttggtggagtggggggtctgggtgggattact

SEQ ID NO: 3894 - DNA, 204 bp, Gossypium hirsutum
  Clone ID: LIB3493-022-P1-M1-A7
tgaagttgaaaccaaggaggtggtagaagaaccaaaggctgttactgaggagccagtagtagaggaggctactaaggaaacagtgccagaaccagttgccgaggagatcaaggaaaccactgaacaaaccgttgaaaccaaagaaactacagagtctagtggggcaccagcagaagcacccaaagaggaagtttagaaggaaga

SEQ ID NO: 3895 - DNA, 315 bp, Gossypium hirsutum
  Clone ID: LIB3493-022-P1-M1-A8
gaagtgtgctagagttcaattgatcaagaatgggaagaagattgcggcattcgtcccaaatgatggttgcttaaactacattgaagagaatgatgaggtgttgattgccggatttggacgaaagggtcatgctgtgggtgatattcctggtgttaggttcaaggttgtgaaggtctcgggtgtttcactgttggcactcttcaaagagaagaaagagaagcctagatcataaattttgagagaggtctctcatcgtgttctgttagttctatttataacaaactatagagatttttattgctatgtagctatttg

SEQ ID NO: 3896 - DNA, 288 bp, Gossypium hirsutum
  unsure (1)..(288): unsure at all n locations; Clone ID: LIB3493-022-P1-M1-A9
atttctagtcaagaatgggtaaaaaacccatacgacggctatggagaaaaagaaaagctctaataaaaagacccagctactttatgttcgatatggtagacgactgcgaggaaaacccataaacttactagtagcaaaactcgctgccccgctgactccattactcactgcttctcattgcaaagccaacactcttncatcagcttccagctccttcaagctctcaaatattcagacaaattttaagagagagagacactctaagctgctctgctcctactaaaatga

SEQ ID NO: 3897 - DNA, 341 bp, Gossypium hirsutum
  unsure (1)..(341): unsure at all n locations; Clone ID: LIB3493-022-P1-M1-B1
ttaccattgaagagggtatatttgaagtgaaagccactgctggtgacgctcatcttggaggtgaagattttgataacagaatggtgaaccactttgtgcaagagtttaaaagaaagaacaagaaggacattagtggtaatcccagggctcttaggaggttgaggactgcttgtgaaagggcgaagagaactttatcatccactgctcaaacaaccatagaaattgactccttgtatgagggtatcgattnttactctaccattacccgtgccaggtttgaagaacttaacatggatctattcaagaagtgtatggaaccagttgagaaatgtttgagggat

SEQ ID NO: 3898 - DNA, 225 bp, Gossypium hirsutum
  Clone ID: LIB3493-022-P1-M1-B11
acccacgcgcacgcgctcgcggggccacccataaaaaaaaaagaaagccagcacgcgggcgcggaaccttttgcagaggggggccctgcaccccacccaaacggtgctggaaacggatagagatcgtcgcgcaagcagcaacccaggggcacaaagagaccagaacccgcaaacgcacacgacaaagcataacgcgccacggacgccgccaaaaagggaaacaca

SEQ ID NO: 3899 - DNA, 66 bp, Gossypium hirsutum
  Clone ID: LIB3493-022-P1-M1-B2
gagaaatcttccaggcaacccagacccagatgcagaagtcatagctgtgtccgcaaagaactgttg

SEQ ID NO: 3900 - DNA, 427 bp, Gossypium hirsutum
  unsure (1)..(427): unsure at all n locations; Clone ID: LIB3493-022-P1-M1-B3
cccgttccgatgagaagctcctatcagtcttccgtgagggagtcaagtacggtgctggaattggccccggtgtctatgatatccactctcccagaataccatcaaccgaagagattgcagacaggattaacaagatgcttgctgtgctcgagaccaacatcttgtgggtcaaccctgactgcgggctcaagactcgtaagtatgctgaggtgaaaccggccctcaacaacatggttgctgcggccaagctgctccgcgctcaacttgccagtgccaagtgagaggatcatgatgagagattggagatccttactccattaatgatttattatacccaagaagagaaagattaanaattgaaagaaatntctgtgttacaaattgaataactctgtgtctttgatgatatatnttgtaggcatgattt

SEQ ID NO: 3901 - DNA, 448 bp, Gossypium hirsutum
  unsure (1)..(448): unsure at all n locations; Clone ID: LIB3493-022-P1-M1-B4
cccacgcgtccgaaaaaaatggagttttggggagttttaatttctggggttttagtttcttggtgggttttgagtgtaaatggtgctaatttaccaccatgtcaattccctgctatttacaactttggtgactcaaactcagaccctggtgggatttcaactgcttttgaacccattagagctccatatggtgtgccctattttcacaaaccatctggtagagactctgatggtcgcctcatcattgacttcatagctgagagacttaagttgccatatcttcatgcatatttgaattccttgggagcaaatttcaggcatggagcanatttcgctactggtggatcaaccataagaagaccgaatgaaaccatttatgaatatgggataagtccatttggtttagatatgcaaattatacaattcgaacagttcaaggcaagggctt

SEQ ID NO: 3902 - DNA, 391 bp, Gossypium hirsutum
  unsure (1)..(391): unsure at all n locations; Clone ID: LIB3493-022-P1-M1-B5
cccacgcgtccgtggggccacccataaaagaaaaagaaagccagcaggcacgccagatcctaatgcagaggtggtttctttatctccgaaaacgttgctggaatcggatagatatgtttgtgagatctgcaaccaagggtttcaaagagaccagaacctgcaaatgcataggagaaggcataaggtgccatggaagctgctgaaaagggaatcacaagaggtgaagaagagggtgttcgtttgccccgagccaacctgcttgcatcatgacccttgccatgctttangtgatctggttggcatcaagaaacatttccggcggaaacacagcaatcagaaacagtgggtttgcgagaaatgctctaaaggttacgctgttcagtctgattac

SEQ ID NO: 3903 - DNA, 137 bp, Gossypium hirsutum
  Clone ID: LIB3493-022-P1-M1-B6
aatagttgctggagctgctgagtacaatataaaacatcatcagcggatgcttcaaatgcttgacgcgcctaggtacatgggtagcatcgttgaagattgttacagataggatgcgatgaatatttcgaagattgacg

SEQ ID NO: 3904 - DNA, 183 bp, Gossypium hirsutum
  unsure (1)..(183): unsure at all n locations; Clone ID: LIB3493-022-P1-M1-B7
ggaacccgtgtcaaggaaagnngtcttcgcaccctacaaagatacctgtcagnttcacaaatccagtatnngcagtcgtttgaagaacatcncgnngagcaaaaatggttacaaaggaataaggannagtgcagcnnctcctttaaagtgggatgatganagaacanncagcgcaannatatt

SEQ ID NO: 3905 - DNA, 324 bp, Gossypium hirsutum
  Clone ID: LIB3493-022-P1-M1-B8
gcagatcagctcatttaaaggcaatggaagtagccaaaggagctggtgcattgctctcatatgatccaaaccttcgcttgccactttggccttcagctgatgaggctaggaaacagattttgtccatttgggataaggcagatattgtcaaggttagtgatgtcgagctcgagttcctcaccggtagcaacaaagtcgacgacgaaactgccatgaaactttggcgacccaactttacactgctcttggtcacccttggtgaaaagggtagccgatactacaccaagaatttccgtggggcagtcgatgctttccatgtcaata

SEQ ID NO: 3906 - DNA, 473 bp, Gossypium hirsutum
  Clone ID: LIB3493-022-P1-M1-B9
ctccaaccaagaagctcaatattagataatgatcatggacctaatttagctcaaagattgcacactgggcactcagaaaatacttctggtcctcagtcagtaaaactgcaaccacaagaggctgcaggaaatgggaatatggttgccatccaaggtgttcatcatagctcaactacctcgggagggagctttgaccttgagacgtctcttgattctctacttccatgtgatatgctcaatgaaatgggaggcccaagcccctacaacggagggagtgaaactactttttctggtttggttcaatctttagatgtgtctcccgattctgatcaagagagtgcttcaacaagagcaatgggtaatattgaactctttgatggtgtagactgtctgacaaaatctcagcttttagagactgttgaaagacatgagctggcccatgggagatgattaaaggggtctaagacttgaat

SEQ ID NO: 3907 - DNA, 387 bp, Gossypium hirsutum
  unsure (1)..(387): unsure at all n locations; Clone ID: LIB3493-022-P1-M1-C1
aaaggggagaggaatatcggctggacaaggtgggagctgtgggtttggaatgaggggtcagaaatcacgttctggcccaggtgttagaaagggatttgagggtggccaaatgccactctataggcgtatccccaaattgagaggaattgccggaggtatgcatgcgggattaccaaaatacataccggttaacttaaaagacatcgaaacagctggatttcaagagggagatgaggtgtcgttggagactntaaaggagaagggtttgatcaacccttcaggaagagagaggaaactccctatgaagattcttggtgactgggagctgaatgttaagctgaacttgaaggcccgtgccttttcagcatctgcaaacgaaaagctcga

SEQ ID NO: 3908 - DNA, 463 bp, Gossypium hirsutum
  Clone ID: LIB3493-022-P1-M1-C10
cccacgcgtccgaaacaaggcaaaaccctaagcagcctctcccccacccccccctctctctttttcgatggcaaaaacgttcaaaccccattgaagtcccaccagccgcttcttcctctgaagaagatgaagaggtgacttcttctgaggaagaagaagaagggtcttcaactgaggaagaagatgaggaagaccccaaaaccgagtcaactccattgatccaaaagagcccaccacccagaaagccggaaaccgctacgcctggcgtcgttaacgatgaatctgatgaatccggttctgattccgaatccgaatccgacaccgctacaccgaatgttaaacctcttgcgacgaaacctatggaggaaagtttgaatgcgaagaaacccagatctaataagccattgacttcgcccattagggcttcttcatctaaacggcctggggagttggacttggatgc

SEQ ID NO: 3909 - DNA, 363 bp, Gossypium hirsutum
  Clone ID: LIB3493-022-P1-M1-C11
cccacgcgtccgaaacatgtcaaaaccctaatcaccctctccggcacggccccttctatctttttcgatggcaaaaactttcaaaccccattgaagtcccaccagccgtttctttctcttaagaagatgaagaggtgacttcttttgatgaataacaagaatggtcttcaactgatgaagaatatgaggaataccccaaaaccgtgtcaactccattgatccaaaagagcccatcacccataaagcctgtatccctttcgtctggcttcgttaacaaaaaattttattaattcgtaccaattccgaattccaatactacacctttacacctaaatgttaacctttttgctaccaaacctattg

SEQ ID NO: 3910 - DNA, 448 bp, Gossypium hirsutum
  Clone ID: LIB3493-022-P1-M1-C2
gagaaatctgatgtgtattcatttggcgtggtcttgtttgaagttctttgtgcaagaccagtgatcgatcccactcttccaagggaaatggtaaatctagctgaatgggcaatgaaatggcagaagaaaggacagctggagcaaataattgattctagtctcaaaggaaacatcaggcctaattctctaaggaagtttggagaaactgccgagaaatgtttagctgattttggtgtcgacaggccctccatgggagatgttttatggaacctggagtatgctcttcaacttcaggaggccgttgttcaaggcgatcccgaagaaaacagtacaaacatgattggtgagctttctccacaaattaacaatttcagtcagcttgatcccactggttcagcaaaatttgaggtgtcaagtgtggatgaccttctccgtgttttaatgagta

SEQ ID NO: 3911 - DNA, 374 bp, Gossypium hirsutum
  Clone ID: LIB3493-022-P1-M1-C3
cggacgcgtgggcttttcctttccagtttcaactcataataatctagtgttccctttcgagggattttcccccttttttttcttttttttttcttttgattttttttgaatttttttcttttttgggtttaatttggtttagtttccttttttgtcctcatcctcatcttctttttcgatttctccagaaatcctaaccctatagattttctcagaatcttcaaaattttaactaaactgaaagaagatgcagcagcaaaggctaaagcagcaacatgctctgatgcaacaggctttgtaccacaatcccagtctcatgagtggtcctcagatagaacctatcttgagtgggaatcttcctcctggctttgatg

SEQ ID NO: 3912 - DNA, 298 bp, Gossypium hirsutum
  Clone ID: LIB3493-022-P1-M1-C4
cggacgcgtgggtggggacttctcaaatccttggaggctttgcactgtaacacaagtggaggaattgaaaatcttgatccgcatgtttcccatatgggctactggaatggtgttctctgctgtatatgctcaaatgtcaactatgtttgtggaacaagggatgatgatggacacaaaaattggttctttcactattcctcctgcttctctctcaacttttgatgttattagtgttattttttgggtccccatctatgataggatcattgtcccaattgcaagaaagttcacacgtaag

SEQ ID NO: 3913 - DNA, 340 bp, Gossypium hirsutum
  Clone ID: LIB3493-022-P1-M1-C5
atttgtttctgatgatgtgggtcttgatgctgacaactgcaaggtcctggtcaatattgagcagcagagccctgatattgcccagggtgtccatggccactttaccaagcgcccagaagatattggagctggtgaccagggccatatgtttggttatgccactgatgaaaccccagaattcatgcctctcagccatgtccttgcaactaagcttggggcacgtcttactgaggttaggaagaatggtacctgcccctggctaaggcctgatggtaaaacacaggttactcgtgagtactacgacgataatggtgccttggttccggttcgtgttcacact

SEQ ID NO: 3914 - DNA, 413 bp, Gossypium hirsutum
  unsure (1)..(413): unsure at all n locations; Clone ID: LIB3493-022-P1-M1-C6
cggacgcgtgggcggacgcgtgggtgcatagtcctcctttctttcagccccttcccatttgtacctcatcattaccctgagattttgcggcaaattcctcctccgagaaacaagagacgacaatggcggggcttgtacctcctggtacctcatccgatgcttgcaagccggctcattccaaagctgatgagaaaactgattacatgaatctcccttgccctattccttatgaagagctccaccgcgaagctctcatgtctctgaagccagaaacctttgaaggattgcgatttgatttcaccaaaggactaaatcagaaattctcactcagtcacagtgtgtttatgggcccaacaganatcccttctcaatctgctgaaaccataaaattcctactgctcactatgaaattg

SEQ ID NO: 3915 - DNA, 386 bp, Gossypium hirsutum
  Clone ID: LIB3493-022-P1-M1-C7
ccatttctcccctaaatcgaacgttgtttttactttcctaaaagaagatggggatcaaacgttctatcctcctcatctccatcttctccctcgcggctatctcagcttgtgctagacctccttcagacattactgatacgcccgagtcacccgattccacacccgaatcacctgattccacacccgaatcacctgattccacacccgaggcacctgatgatgactattcacctaatgcaccagatgaagcagcagacggttatgcacctccacctgaagcaccaaccccatctgcaacctttacaatattgccaggcggtagttaccctgagctcgatcaaatttgtggagcaaccgactaccccaccgaatgcgtaagattcatt

SEQ ID NO: 3916 - DNA, 392 bp, Gossypium hirsutum
  Clone ID: LIB3493-022-P1-M1-C8
gaaaaattatgactcggttttgtataaatgctagtgtaagtctggtaatgcctcgtaaccctattccgatgatggatatgggttaagggtgttacaaaatttgtggttgattttcgtgttttgcagtaagctttggggaggtttttaaaccatatgggcagccacacgggcatgtgccacttggatattaggttaattgtttgttacacggttcgggacaggtcacacggtcatgctttccctgtgtcctgcaagttagtaagttacatagcctgtgcacacgaccgtgtaccttattcacacggacgtgtgtcttggccatatggacgtgtcccctctgtacttaaaattgacaatgagctacaaggctagctcacacaggcatgtacctt

SEQ ID NO: 3917 - DNA, 437 bp, Gossypium hirsutum
  Clone ID: LIB3493-022-P1-M1-C9
cacaaatctcccatttatcttcttctccctaagacgcttcgccccataacccatctaacaatggtagcctcaaaattctgttttgctttgtctcttgctattctttcaatctgggccgttgatgctgcccaacaccatgctctggcgccctctccttcttcccccgtggactgctcctctctgattctcaacatggcggattgtttgtcctttgtgtcgagcgggagcaagacgtcgaagcctgaaggaacctgttgttctggcttgaaaactgtgttgaaagctggaccccaatgcttgtgtgaggcttttaagagcagtgcttctctgggtgtcactttgaatgtcaccaaggccatgactttgcccgctgcttgcaaagtctctgctccttctgccactcggtgtgcattgtctctcagtcctactggtgcacc

SEQ ID NO: 3918 - DNA, 471 bp, Gossypium hirsutum
  Clone ID: LIB3493-022-P1-M1-D1
gtcccgtatgctgtgcctatgatgcagggagcagctgaaatctgtgccaagatggaaacacctgatgaagagacagtggattatggcaactagctgctactaattatatccgaaactgatctgggtattctccaaggttttaagaccgtgaacactgttgtgatgtagctctatgccatacatctgtagatgttcatagaattggcctttaaagacaatctaaggaatgtaaacgtgtcaaaggcttccctactagtgatcgtagagcttatacattctacctgtttcaacatagactttctgacataagaccacgtggtgctcgagctatctctattgaaatgttaccgatcagttcacaatctcatgcttggcgagcgatggtgcacgccaacccacaaatattgcagcctatgcttcatgagctggggatacagaattctaatctaatgagacttattcaagatcatc

SEQ ID NO: 3919 - DNA, 465 bp, Gossypium hirsutum
  Clone ID: LIB3493-022-P1-M1-D10
tatagcaaactacaccatcagagtagcaaatgatccaagaacatgcaataaaatagtgatttataagatgcagaagaatattttgtcccagattgaattaatttcgttgtgggagaagaaaacaggtaaatatttcaagaaggttcatgtaccagaggaagaacttgtgtaactgacagagaccttaccatttttcggattatgtacgtgcattggttctttacggtctatttttatatggtgtttttgtttattttgtgcgttggttggatgacttagtatgtttcttttatttttttattattttttttccttatttcttttaatttgttggtatgtgttatttttcttttttttttttattgttttgttttatattattttattttatttatatttgttctataatttctgttgattcattttattttgatgctttgtttgttttattttatttaattttat

SEQ ID NO: 3920 - DNA, 351 bp, Gossypium hirsutum
  Clone ID: LIB3493-022-P1-M1-D2
taaatacaatagatatggcaacctctgtggagtgtgggcgggaagttaggttccggcgatccttatggtccctggtggaatgtatggtcccttgttgcggcttacagccttcaatgtcaggcacagtttctagtgacacggaatcaagccatggctcaatcactacttcaacgtcaatttcaacttcaacatcaaccatcacggggactttcttcgggtacaggaaggggcgcgtgagcttctgcctgcaggatgacagccgaagctcttcgcttttactgttggagttgggtgtccctactgcataccttgccagagagatgcagttcggtctgctgaggatagcgctgg

SEQ ID NO: 3921 - DNA, 456 bp, Gossypium hirsutum
  Clone ID: LIB3493-022-P1-M1-D3
tctatttacaagtctcaggcttctgccttggagcagcatgcagctcctaactgcaaggttttggttgttgctaaccctgccaacaccaatgcattgatcctgaaggaatttgcaccttcaatccctgcaaagaacattacctgtttgacaaggctggatcataacagggcactaggtcaaatctcagagaaactaaatgtccaagtttctgatgttaagaatgtgattatttggggtaatcattcatcaactcaatatcctgatgtcaatcacgcaactgttatgactccatctggagaaaagccggttcgcgagcttgttaaggatgatgcatggttgaatggagaattcataaccactgtccaacaacgtggtgctgcaatcatcaaagctaggaaactctcaagtgcactatctgctgctagtgctgcttgtgatcacattcgtgattgggtc

SEQ ID NO: 3922 - DNA, 363 bp, Gossypium hirsutum
  unsure (1)..(363): unsure at all n locations; Clone ID: LIB3493-022-P1-M1-D4
cccaccacaatggaagagaaaaggaaaggccccggtcggttcgtcggagcaccccaaacagtggatcggaggtattttttactccttttttttattcttgcttcgtaaacgaagaaatataaaaaaaaaacccagagaatcgaagattgaaacatccacaaaaatattcacctttcgaaaactctattccttttttgattttagtgtgcgtacccgtgagaagggatctcctctggctttttaaagccggattacaatattttacaatccattttcttgtcgttttgctatttgtttcttctatttgncatttttcttattatttttttactgctcgcgtgtttctctctttgcaggtgtgtc

SEQ ID NO: 3923 - DNA, 323 bp, Gossypium hirsutum
  Clone ID: LIB3493-022-P1-M1-D5
cagatgtctatgaaattatacgacgtacctgtttcccatctgtccttgattcagatcaaccacaaacaattccagctcatgagtaagcaaaatttcagcatctagttttgtttatgcagctagcaagaataattagtttcccttactgatcttttctggttgttacctatattctagttttaacagcatgaactgtgccagcttaagaatatgccatacctcttgtttcttagtttaactgtacgaaagatttaacttaaagtgaaataaggttaataggagatggattagtaaaataatgaagttagacttgaaatgatgct

SEQ ID NO: 3924 - DNA, 427 bp, Gossypium hirsutum
  Clone ID: LIB3493-022-P1-M1-D6
gcttgcaagtgagcgctggatgccagtccatacagttgaaagtattgtattgagtatcatatcaatgctttcaagccctaatgatgaatctcctgcgaatgttgaagctgctgtaagtgattgccgactttcttgattcagtgattcctctcttttgttgcggtttggcattccgttgatgttctaacgtggtttctatccttctattaaggcttctagtgtaacaaaactttctttaaaatatgcttatttgatcggtctcattttatcattaattaaaatgactcagatttgtgcttttaacattcacttggttttctttccctttgctatcaatcatctatctgtatgatctcgtcacacaaccattgtcatcagcatctcgttctattgagtatcatgcggcacaatgcaccatgctagtttt

SEQ ID NO: 3925 - DNA, 462 bp, Gossypium hirsutum
  Clone ID: LIB3493-022-P1-M1-D7
ggaacttcaggatcgaatggaacatgactataacattggttcggcaattcgagacaaactgattcctcatgcagtatcatggtttacgggggaagctgttcaggggaatgagtatgatggattagaaagtgattatgacagtgatgaccaagatggtgatgaggatgaagatggggatgaagaagatgagagagaagaaagaaagggcaaaaagatgcagcgcgcaagtgcaaatgccggcctaaatcagcatgttgaacgccctccagagtgtaagcaacagtagcatttggataccgtcttggttgcttaaaattttgagtaatatatattccctaattgtgagtatctcattcaacttttttttttactttttgttttttaatggaggattggggttgcctattaatgttatgtggcagtggaactctaaacctacgtaatgtttctagtttctaaatc

SEQ ID NO: 3926 - DNA, 353 bp, Gossypium hirsutum
  Clone ID: LIB3493-022-P1-M1-D8
tttctctcaaaaaagtgaagcaaagaatacttgcatcaaacagatggcaaccatggagaaggggttagagtttgagaacaagaatttaggcctcaagcacctaaacttcgtcagggtggctacaatccacgccttggtttgcgtctcgaacctttacgattactctaaacagaactcggggccgttgagatccaccgttgacgccgtcgagcatgccgttaccactgccgtcggtcccgcctacgggaaatttaaggatgttcctgatcattttcttggatttcttgataacaaggtagatgaggtttcacacaaatttgacgagcatgcttcagcaccagcccaagcaagtg

SEQ ID NO: 3927 - DNA, 472 bp, Gossypium hirsutum
  unsure (1)..(472): unsure at all n locations; Clone ID: LIB3493-022-P1-M1-D9
cgnntccggttatcttcatgaggggggtgtcttcaatagaaccgcccnnntcgatttactggtgcgggtgttccatttacgttctgttagtttcttaccgttttatgaattatttaagtaacggctgaatatgagaaagagtgcnnatttcagttcacaatcggtcagggctggtatccaagtcnggaaatggcctgctgggaggctttactggccttgaacatggnnaatccagcctgatggccacgatgccaagtgacaatgactgtcggaggaggtgatgatgcttttaacacctttttcagtgaaactggtgctggaaagcacgttcctcgtgctgtctttgtggatcttgagcctactgttattgatgaagtgaggactggtacttaccgtcagcttttccaccctgagcaactcatcattggcaaggaagactctgtcaacaacttctcccggggccactacacta

SEQ ID NO: 3928 - DNA, 392 bp, Gossypium hirsutum
  Clone ID: LIB3493-022-P1-M1-E1
ctcttattatatataaaccctaagttaggtgcagggaaaagagcgatggcggcagttcccggacagttgatttgggaggtagtgaagaagaacaattgctttttggtgaggcagtttggaagaggaactgctagccttcagttcagcaaagaacccaacaatctctacaacctccactcctacaaacactttgggttggcaaacaagaaaacagtcaccattcaaagtgggggcaaagaccagtctgtgctgctagcaaccaccaagactaagaagcagaacaagccttcggccttgcttcacaagtccctcatgaaaaaggagttccccaggatggccaaggcggtcaaaaaccaggtgacagacaactactacaggccatatttaacaaa

SEQ ID NO: 3929 - DNA, 403 bp, Gossypium hirsutum
  Clone ID: LIB3493-022-P1-M1-E10
ataatttccaggtatcggcaacagccacgctctccatttattcgccatggtgattttgcacaaaaatttttttttaatttccaggatgcttttacaagtttttctttaagaaaagaaaaggatcagatttcttggatgaggcagtgatttataattattattttttttaagtgttaggaggttttttttgttaattaatttatttttttttgtttgatttattgtatatttaggtgttttttgttattttgttattattttttttttttatttttttaaattttttgattttttttttttattttgttattttattttatttatattttgtgtgtgtgttgattgtttttttttttttattatttgtgttttttgtatttatttattatttttttttatattt

SEQ ID NO: 3930 - DNA, 86 bp, Gossypium hirsutum
  Clone ID: LIB3493-022-P1-M1-E11
atttttatcagttatctttttcatccaccctcttcatttacgcgcaagggtttttttctcaaaacttttttcttattttccataat

SEQ ID NO: 3931 - DNA, 351 bp, Gossypium hirsutum
  Clone ID: LIB3493-022-P1-M1-E12
gttgctactagttgaaatgagctctgttggtaacctttccacgggggggtttacttctgatgacttttaattttcttaataacatttttttttttcatattttttatattagcaatatgcatatttgcccgttcatctttattgtatttttttatgtttattttattttaattgttatatgttatttttcttttctttctaatttttttatttattattatttctatatttttttttgtttttttatatttgtttttttttttgtatttatttattttagttattaggtattttttaatattattttttaatttttattttttatttttatttatttatttttttattttt

SEQ ID NO: 3932 - DNA, 231 bp, Gossypium hirsutum
  Clone ID: LIB3493-022-P1-M1-E2
gtcgatcttcccgaatttccaacaaagaggagaagaaagccaatcattcggggtggtaaaagtgaatttgttgatgcccattaaagtgaactaccacattcggtcccagaacctcccttgaaacccgtattgactgaaatacctgatacacagatagtagctcctcttgatgaagaggaaacaatccaacttgctgaggaaacactttaagcatgggaacacataaggaga

SEQ ID NO: 3933 - DNA, 404 bp, Gossypium hirsutum
  Clone ID: LIB3493-022-P1-M1-E3
ctgaagtgtctgccttgctaggccgtattccatctgctgtcggttaccaaccaaccttggctactgatcttggaggtcttcaggaacgtattaccaccaccaagaaaggttctatcacttctgttcaagccatatatgtgcctgctgatgacttgacagatccagctcctgcaacaacctttgctcacttggatgccacaactgtgttgtcccgacagatctctgagcttggtatttatcctgctgtggatcctttggattctacatctcgtatgctctctcctcatattttgggtgaggaacactacaacactgctcgtggtgttcagaaagttcttcaaaactacaagaacttgcaagatattattgctattttggggatggacgagcttagtggaaatgat

SEQ ID NO: 3934 - DNA, 236 bp, Gossypium hirsutum
  unsure (1)..(236): unsure at all n locations; Clone ID: LIB3493-022-P1-M1-E4
ttttatttttcattcattgccttgcatttcggtactcaaaaagcttgcgcatggctatcatctactttcttttataagggtcacaagtttttgactaattagttctgttttctcttcacaaacttcttcaatattgaaagtgccaagatgccaagatcaaggggctcggacatgccacanaggcaatctccttgagggacgcatcatgttaggtcatctatttttgatttataccc

SEQ ID NO: 3935 - DNA, 401 bp, Gossypium hirsutum
  unsure (1)..(401): unsure at all n locations; Clone ID: LIB3493-022-P1-M1-E5
cggacgcgtgggttgttctgttgttattagtagcagagggaaattgagtgtggctgactttgtgttatccgtttctatctcgttttttcgttgattttttgctggaatatttgtagatctgtgcggcttttgtgtttgtttggagtttttagcgtgtatgtatgtttttataataagatgcgagatttttgaggtttgactatggattgtttatggaagttatattgcaaaaaacggttcattttgtaaagctttgagttgacatgagtaaataaatgttgccgcgcgttgacttaaactntaattggttttacttttcttcttttacttaaagagtagctaatttttgagtgggatctactgaatctgtaaattttacctcatttttgtcttttaaattt

SEQ ID NO: 3936 - DNA, 433 bp, Gossypium hirsutum
  unsure (1)..(433): unsure at all n locations; Clone ID: LIB3493-022-P1-M1-E6
caagtccgtcccatctttttttcagttttatgatctttttgctttctgttttattctatattctccaagcttcatggatttagcacataagctcctattcgcagctttgctcatctttgcagcaaccattgatgggacgcaggcagctgccatggtttctggtgctgttttctgtgaccaatgcaaagatggccagagatccctctntgattatcccctttctggaatgaaggtgactgttacctgtgctgatggtactgggcaagtgacaatgtcaagggaagagactacanatgtatttgggaactatgtgatgaggtttgatggcacaccaganctaagtaactgcaatgcccaggtttcagggagtggagaaggtcaaatgattgtggtgcaactgctggccctgcccagaaacttagacttatgttca

SEQ ID NO: 3937 - DNA, 402 bp, Gossypium hirsutum
  Clone ID: LIB3493-022-P1-M1-E7
tgaagtcttggttccctctggtgatgcccaagaaacatggtatagttgtgtactaaagcaagtatctgtctatggagtggcggcaggatactgcatttcagcttctcttctctccatcatcaacaaatgggctgtaatgaaatttccttatccaggggcactaactgctttgcagtatctgacaagcgcagctggtgtagttctctgtggatggtttaaggtcctagagcatgatccacttgaccttcggaccatggggcagttcctacctgcagccattatattttatctctctctctttaccaacagtgagctcctcctacatgctaatgttgacactttcattgtcttccgatcagcggttcctatatttgttgcaataggaaagaccctttacttgag

SEQ ID NO: 3938 - DNA, 427 bp, Gossypium hirsutum
  Clone ID: LIB3493-022-P1-M1-E8
gcattcaaaactcatccaatgaatctactaagtgagaggacccttaagggtgctttttatggcaactataaaccacgcactgatattcccatggttgtcgacaaatatttgaacaaggagctggggctggatatggacaagttcatcacacactctgtgccttttgccgatattaacaaggcattcgactacatgctccagggtataggtctgagatgcatgattcatttggatgcttaaggaaatgttgctgctgtatatttgcccatccaaggatcaaaactctaatgttttgtcctactatgtgttatattatgtgcctacttaagctacctttcccggttatcaagagtgcctatatagaactctctctctcaaaaaaaaaaaaaaaaagagaaaagagttctttatatggaggtttatatta

SEQ ID NO: 3939 - DNA, 230 bp, Gossypium hirsutum
  Clone ID: LIB3493-022-P1-M1-E9
ctttgtgttaaataaaaaagtaaaacttcaaaaatatcacattgtaagaataaaattggctcaatactagtctctctagtcatgagctgtgattgtattactctgtatgtaatcatctatgttctatgagtacctgtaacagctttggattagctccctagtctctaccatgtaatcacttcctatttcttaatgaagttaacttaatgtaagaaataaatgattaattt

SEQ ID NO: 3940 - DNA, 335 bp, Gossypium hirsutum
  Clone ID: LIB3493-022-P1-M1-F1
gtttctatacagattcagaaagaaataaaggaagaagaagcaatggcgactcttacagtgcccacgacagttccttcggtgtctgaagattgtgaacagctaagaaaagccttttcaggatggggaactaatgagggcttaatcatagatatattgggtcacagaaatgccgagcaacgaaacttgattcgaaaaacctacgctgaaacctatggagaggatctcctcaaggcactagacaaggagctctcgaatgactttgagaggctggttttgctttgggctcttgatcctgctaaacgtgatgcccttttggctaatgaagccaccaaaag

SEQ ID NO: 3941 - DNA, 324 bp, Gossypium hirsutum
  unsure (1)..(324): unsure at all n locations; Clone ID: LIB3493-022-P1-M1-F10
atatttcttggcagctatgatgatattgaagaaattaaagcactctatgctgctgaagggaaaaaggaatgagtgtacaattctaattcttctcccactctatctttactggattcaggtttcaatcatcaaagtatttaacccatttcaaagcttattttgtaatgggatactatatttatattgaacaatagttaagttcccccaaaagatatgggatgagaataaaaaaaaaaagttattttnaaaaaaaaaaaaaaaaaaataataaaatttttaaaaataataataaatttaaaataataaaattttaaataatttttt

SEQ ID NO: 3942 - DNA, 159 bp, Gossypium hirsutum
  Clone ID: LIB3493-022-P1-M1-F11
atatttcttgtcctctattatgatatttaccaaattaaatcacgcgacgcttctttattgaaatactcatcactccacaatactaattcttctaccactctatctttactcgactcatttttcaaacatcaaactattcaacccacctcaaaacttatt

SEQ ID NO: 3943 - DNA, 141 bp, Gossypium hirsutum
  Clone ID: LIB3493-022-P1-M1-F2
ttgtagcaaactttacattccttctggaatcttctatgcgatcatatgaaaggaacattaaacatagatggaagacaacttgtttcatgttttatgtctggttgaaacttattgagtttgaggctgattgtcatttgattt

SEQ ID NO: 3944 - DNA, 435 bp, Gossypium hirsutum
  Clone ID: LIB3493-022-P1-M1-F4
cagagtctcctttacagttgccagggcaggtcagaatggataccaccaccgtactgagatgaacaagaaggtctacagggttggcaaggttggtgatgagacccactctgccataactgattatgacaggactgagaaagatattaccccaattggtgggttccctcactatggtgttgtgaaaagtgattacctgatgatcaaaggagggtgtgttggacctaagaagagggtggttacacttcgtcagtctcttattaaccagacatctcgtgtggctctggaggaaatcaaactcaagttcatcgacacctcctcaaagtttgggcatggacgtttccagacaacacaggaaaaacagaagttctatggtcgactcaaggcataagtttgggaagtggtcaggaattttgggctattgtatggttaggtttt

SEQ ID NO: 3945 - DNA, 469 bp, Gossypium hirsutum
  Clone ID: LIB3493-022-P1-M1-F5
cccacgcgtccgcaaaatcaactgcttcacaatggcctctacaaccatggctctttcttccccatcattcgccggtaaggcagtgaagttctccccttccacccctgaaatccagggaactggccgtgtttccatgaggaaaaccaccaagcctgttccttctggtagcccatggtacggtcctgaccgagttttgtacttgggtccactttccggtgagccaccatcttacttgaccggtgagttccctggtgactatggttgggacactgctggactctcagctgatcccgagacctttgctaggaaccgtgagctcgaagtcattcactgcagatgggccatgttgggagctcttgggtgtgttttccctgagctgttggctaggaacggtgtcaagttcggtgaaactgtatggttcaaggccgggtctcaaatcttcagtgagggtggacttgactacttgggt

SEQ ID NO: 3946 - DNA, 391 bp, Gossypium hirsutum
  Clone ID: LIB3493-022-P1-M1-F6
tcttcccttgtaactgttaaaatctttgtcactgtgatcattaatggccaccgctgaacctgaagttccagtcactgagcagcagccggcggcagcagaggagccaaagccggcggaaaagcctgtgaaggagaagagacccaaagctccaaaggagaaaaagcctaaacaacccaaatccacagcacgtcctccttattttcagatgatcaaggaggcgcttttggctttgaaagagaagagtggttcaagtccgtacgctatagccaaatacatggaagagaagcacaaggcggtgcttccagcgaatttcaggaaaatcttaggtcttcagcttaaaaactcagctgccagaggcaagctgataaagatcaaggcctcttacaagctc

SEQ ID NO: 3947 - DNA, 448 bp, Gossypium hirsutum
  Clone ID: LIB3493-022-P1-M1-F7
aaataaacaaaaataaatgattagcacttcgattctctccagaggtggccgaggaataaggttcctaccgtttcatcgccatttaattcctgctactactactacctgttccactactacacttgccactctttcctcccacccaaaccccacttctttcaaaatcgccactaaaaaccccgctcctctccaaaacatcgtgaaatcctcgtcaccagttcctgggattgttgggttttcaatgatggcgtctgcaactgctggagaagatggtcatttcaagttgtctgaaactagtgtgcttaaaatcaacaagggtgatattactaagtggtttattgatggctcctctgatgctattgttaatccagcaaacccgagaatgcttcgaggtggtggcgctgatggagccatacatagagctgctggcccagaacttaaagaagca

SEQ ID NO: 3948 - DNA, 468 bp, Gossypium hirsutum
  Clone ID: LIB3493-022-P1-M1-F8
ctttttaccattcatagcatagcaggttagtccaactccacacccaccaccgttggctgtttttgatcatccgaaaaagaatggtgaccgtggaagaagttcgtaaggctcaacgtgcccaaggccctgccaccgtgttggccatcggcacatcaaccccacctaattgtgttgatcagagcacataccctgactactattttcatatcacaaatagtgagcacaagaccgagttgaaagagaaattcaagcgcatgtgtgaaaaatcgatgatcaagaagcgatacatgtaccttacagaagagattttgaaagagaatcccaatgtatgtgaatacatggctccttcactggatgctaggcaagatatggtggtagttgaggtgccaaagctaggcaaagaagcagccaccaaggccattaaggaatggggccagcccaagttcaagatcacccaccttgtctttt

SEQ ID NO: 3949 - DNA, 426 bp, Gossypium hirsutum
  Clone ID: LIB3493-022-P1-M1-F9
cccacgcgtccgggtagatccactgcatccagaattattggtagatcctcttgcgattttgcgtcctcacagcaagttgactcatcagttgccactggttagtgcctactcaccctttgcgagaggtgttggtcttggtttggaacatcagagaagaaaaatggacatcacaactaatgaacctttattcacaaattgcacaagagattttatcggcaccctggattacatattctacaccgcggattctttaacagtggaggcattattggaactcttggatgaggatagcttgaggaaagacactgcccttccttctccagagtggtcctctgatcatatagcactgttagctgaattccggttccagacaaggcctagacgttaacacttttaaggtcatgaagatggccaagaaaatgactc

SEQ ID NO: 3950 - DNA, 237 bp, Gossypium hirsutum
  Clone ID: LIB3493-022-P1-M1-G1
ggaaaacaaaatttcaagcttgaaatttagattcaaacactataccttttcaggctgtcataaaactcaaatcccaagtccttatcaatgggtttctcagtcgagaattcggtaacacattcccactcgagagctcacataatcttcttaataagcaatacccttctattgggagccgcctccagttgcgtgttcctaaccctttacctccgatggttccctcccctgtgcggattc

SEQ ID NO: 3951 - DNA, 409 bp, Gossypium hirsutum
  Clone ID: LIB3493-022-P1-M1-G10
gggccgggtccattccaacttcggcgccgtcaatatcacccgtgaccctttaaccaactccatcacaatccaatcaccggcccctttctccccatccaacgtcaccgttttatcgttattcaaaaccctcccttacaatatcacaatcctagccgttgattccctccttgttccctacgacttcaatctattggcctctgaaacccggcccccccttggcctcaacattaccaaagccctaatcgatggccataatttcaacgtcgccgcctcaatgttagccgcttccggcgtcgtcgatgaattcgaagccgacgagggcggtgctggaatcactctctttgtccccacagatgatgcgttcggtgatctgccgggcaatgtcaaatggcagtcactcccagctgat

SEQ ID NO: 3952 - DNA, 92 bp, Gossypium hirsutum
  Clone ID: LIB3493-022-P1-M1-G12
taaaaactggcgttactttttagataatattgaatcttaaagggagagagttatctatagagagtatgaatttccaccaccatccaaaccct

SEQ ID NO: 3953 - DNA, 237 bp, Gossypium hirsutum
  Clone ID: LIB3493-022-P1-M1-G2
gttaaaacccccgtccagataatatattcccttgcttccaaaggaaattagtgagatggggagaagaccatcttatggaaatactctctttactttactattctttaaacgatgaacgctaaccatgcttcccttggtcgacggaccctggaagagattcgtcaaaagagagcctcctatagaatcagcagagcttctttcgaatcggatctcaccaaagctccaatccctaactga

SEQ ID NO: 3954 - DNA, 149 bp, Gossypium hirsutum
  Clone ID: LIB3493-022-P1-M1-G3
cacaaaattctgaaacgttcatataaagctcgcattctattcaccaaattgcgatgtattgttgaacattagactgcaaatctaaaagcttggtagcttgatataggaatccctttactgtatgacaaggcttcactcttatatatgtt

SEQ ID NO: 3955 - DNA, 419 bp, Gossypium hirsutum
  unsure (1)..(419): unsure at all n locations; Clone ID: LIB3493-022-P1-M1-G4
cggacgcgtgggcgatactcaacggtgttttgtgattaaaaaaactaccaagattgtggcaaaacaagatggcttccctgcatgaaccatggctactggagaacgggttgaaggggtctagcaaggagattcgccatggcaggactgcacacaacatgtcgtcttcgtcgttgcggaaaaaatcggacctgacgcttgtttccaaggttcggtatgcaatgcttaggcagttcctcgccaatcttcaagaggtcatattagggaccaagctctccgttctcttcccagctattccattggccattgttgctgagtgttatggatttggaagaccctgngtgtttgcattaagtttactcggacttacaccattggctgaacgagtcagctttctcaccgagcaaatngcttattacact

SEQ ID NO: 3956 - DNA, 386 bp, Gossypium hirsutum
  Clone ID: LIB3493-022-P1-M1-G5
cttgtttatggtcaaatgaatgagccccctggtgctcgtgctcgtgttggccttactggtctgactgttgctgaacatttccgtgatgctgaagggcaggatgtgcttctcttcattgacaacattttccgttttactcaagcaaactctgaagtgtctgccttgctaggtcgtattccatctgctgtcggttaccaaccaaccttggctactgatcttggaggtcttcaggaacgtattaccaccaccaagaaaggttctatcacttctgttcaagccatatatgtgcctgctgatgacttgacagatccagctcctgcgacaacctttgctcacttggatgccacaactgtgttgtcccgacagatcttcgagcttggtattta

SEQ ID NO: 3957 - DNA, 395 bp, Gossypium hirsutum
  unsure (1)..(395): unsure at all n locations; Clone ID: LIB3493-022-P1-M1-G6
cgccattctcaacttttggtattctccgcctggatcacagctataaattccaatcaatttccctgattaaatccctatttccctcaaaataatgaagcatcaattttttctccgatccccaagtcaccaaaccctgaccgtaaccctagaatccacccaatccctaacccttcgccaactcaaatcctctctccttccgaacccacaatccttgtcctccttctacttcaccctcaatggaaaacccctctctgattccacccttctcccaaacccccagatttcccatctttcaaccctttttctcctcccccgcgtcttcngtggcggaggcgatggcggcgccactggagccgagtcccgcgactgttatctcaagatgtacgctgtcaaaa

SEQ ID NO: 3958 - DNA, 452 bp, Gossypium hirsutum
  Clone ID: LIB3493-022-P1-M1-G7
aaagaaaacctcaaaaatccattgcctttcattacatttctaattcactctactgcttatatttctttcctttgagattaaacttctgttcttccaatttgatactctgttcttcccagttttttttcttctttttctgtgctctgtttattttcccgggaaagttgaaaattttctttccatttcagttagaaaattgatctcgttgaaaagacctaaacgtttgaaatcatgggtttttgttgaaaccaagaaatcttttaaatttccctgccttcgatcataaaaagtaagaaaaaagaaaaatttccctcattttctctcgttttctcgggctttcttttgttttcgtttcttaacttgggcttgaaattactgagttttgaaaggtaaagatccactatttgtttcttcatcggcgatcaaaacagagcaagaccttgagttttctt

SEQ ID NO: 3959 - DNA, 358 bp, Gossypium hirsutum
  unsure (1)..(358): unsure at all n locations; Clone ID: LIB3493-022-P1-M1-G9
cggacgcgtgggctctgaagtacttgaatggtattcagaactaagtgctcaacagatatgggatgagaaggcttattctccaaccaggaagaaactattgtctgcattggaaagcatctcaggatacagtcctgaggctttgttgaaacgtcttcctccagatgctctatttgaagagcgtgcgattctgttgggaaaaatgaaccaacatgagctngctctatcactatatgttcataagcttaatgtacctgaactggcactggcctattgcgatcgggttatgagtcatctgttcatcaaccaccaacaaaatcttctggcaatatatacctcactctgtaacagatatatctga

SEQ ID NO: 3960 - DNA, 91 bp, Gossypium hirsutum
  Clone ID: LIB3493-022-P1-M1-H1
cggacgcgtgggcaagggtattggagattgtttcaagcgaacaataagggttgaaggttatggttctctgtggagagggaacactgccaat

SEQ ID NO: 3961 - DNA, 405 bp, Gossypium hirsutum
  Clone ID: LIB3493-022-P1-M1-H10
cggacgcgtgggcggacgcgtgggtttcacatcaaccctaaccctacctcaccaatcaggatacaacatgaagggaggtaaatccaagtcagatactaagggctctaggctcgccgtgaacaagaaatctagcgccaaagctggaaagaaatcggggaaggcggctaaggatccaaacaagccaaagaggcctgctagtgccttcttcgttttcatggaagagttccgtgagcaatacaagaaggaacacccaaaaaacaaatctgtcgctgctgtgggcaaagctggtggagataaatggaagagcttgtctgatgctgaaaaagcaccttatatagcaaaggcagagaagcgaaaggtcgagtatgaaaagaacatgaaagcctacactaagagacagactga

SEQ ID NO: 3962 - DNA, 347 bp, Gossypium hirsutum
  Clone ID: LIB3493-022-P1-M1-H11
cacgcgttcgcgttcccgtgggcggactcatgggtttcacaatcaacgcctaaggcctagggttaccaatcaggatacaacatgaagggaggtaaatccaagtcagatactaagggctctaggctcgccgtgaacaagaaatctagcgccaattctggtaagaaatctttttatgcggttaatgttgcaaacaagccaaagaggcctgctagtgccttcttcgttttcatggaggagtttcgtgagcaatacatgaaggaacacccataaatcaaatctgtccctgctagaggcaaagctggtggagataaatggaacagtttgttttttgcttaaaaagcatctta

SEQ ID NO: 3963 - DNA, 448 bp, Gossypium hirsutum
  Clone ID: LIB3493-022-P1-M1-H2
gcgcggacgcgtggcgctttgagttcattcacaaaaatttctctggattaataaggatgtattatattcttttattaccagagatttactgtgattaaggaaaaagcatgtgttattttttatataccttgcaagtgtgtatgagtcatgaggcgaggttcaacttagtcaggtcggttcctcatatgtataattaatttaaatttggattctaaattttttgtactttaatatttatgacaacttgagttttaacttttggattttaattgtgttattaatttattattttaaattttaaaactaaattaattaattttaatatttagttttaaagttaaaattttcattgaaaattaaatttaaataatattttttatttatccttaaaagtttatctaaagttcaaatttaaaaataaaaaattattaatatttatcataaaaat

SEQ ID NO: 3964 - DNA, 474 bp, Gossypium hirsutum
  Clone ID: LIB3493-022-P1-M1-H3
actgcctggctggacccacccatgcgttcgggtattgcagctcatttaccaaaaagaacagacaatgagattaagaactactggaatacacatctaaagaaaagattgaacaagatggggatcgatcccgtgacgcagaagcctaaaactaatgccctcgggtccgcaaccggtaaccccaaggatgcagctaccctcagccatatggctcaatgggagagtgctcggttagaagccgaagccaggctggtaagagagtcgaaattcgttggctcctcctcttcctcttcttcttcttcttcttcctcggctccacagcacactagcaacactgtatgactccgccggcgactaggccacaatgcctcgatgtgctcaaagcttggcaaggtttagtcaccggattgttcactttcaataacacaactgacaaccttcagtcttcgacgtcaacgttgaacttcgtggagaaca

SEQ ID NO: 3965 - DNA, 344 bp, Gossypium hirsutum
  unsure (1)..(344): unsure at all n locations; Clone ID: LIB3493-022-P1-M1-H4
aagaccgggcatcaccttgaatctacagattgtaattatttagtatggatttcctttagcggattaggaaataggatactgaccctagcctcagcatttctctatgctctccttacaaatcgtgttctactcgttgaccctggaactgatatggttgatcttttttgcgaaccatttccggaggtctcctggtttctccctctggatttcccccttaaaaatcaattcgacagctttgatcagaaatctcctcattgttatggaagaatgctgaagaacaaactctttgctaattcaagcaaatcgatattggcaccttntgtatatctccatctgattcatga

SEQ ID NO: 3966 - DNA, 378 bp, Gossypium hirsutum
  Clone ID: LIB3493-022-P1-M1-H5
cctttccttccctctgaaccgcaaaaactatccccaaaggtggactttcaaggcttctctttcagcccaggaatctgctcgcactgaaaatgtaaaagcatcagctggagaagattttcccggtttaaaggccatgattggagtttaccgggaggcgcttctcaatggagatgataggattgtatctgaaattgagagtagaattagcattttagaaaacgagaagaatggattggaaaaacaagttttggaattgtcggcagagataacctctgggaaagagaagtatatccgtttgcaagctgattatgataattatcggaaaagatctgagaaggagagacttacggcaaggtctgatgcttaaggagagtgatg

SEQ ID NO: 3967 - DNA, 310 bp, Gossypium hirsutum
  Clone ID: LIB3493-022-P1-M1-H6
cggacgcgtgggaaaaaaaaaaagaagaaaaagaaagatggggagggggaagattgagatcaagaggattgagaactcaagtaacaggcaggttacttattcaaagagaaggaatgggattatgaagaaagctaaagagattactatactgtgtgatgctaaagtttctcttattatctttggtagttctggcaagatgcacgagtattgcagcccttctactaatttggtcgatattttggaccaatatcagaagacttcagggaagaagttatgggatgctaaacatgagaatctcagcaatgaaatt

SEQ ID NO: 3968 - DNA, 236 bp, Gossypium hirsutum
  Clone ID: LIB3493-022-P1-M1-H7
cggacgcgtgggcaaagaagcaatcagaggttcagctctctaatcaccccacaggagcagcctgaaaactttaaagccccttctattttgagttccaaagggaacaaaatctcttttttattatatattttttttagtttttaagtagtccagaggatttcttagttttggtttatgctttatgacttggttaccttgcctattggtaatggattaggtttaattcttttcttttc

SEQ ID NO: 3969 - DNA, 325 bp, Gossypium hirsutum
  Clone ID: LIB3493-022-P1-M1-H8
aaaaaaagaaaagaagagggagagaagaggaagagagggggggaaggaagggatttccggtcaccggacggccaccgggggctcgccggcgccggccaccgcgaaaggtatgaaatttttttattttttatttttagttcttttttcctaaagtatatgcatgcgatggatttaaagattaaaaagcaaaaatcaccttgaaccctgttttggtattctgttttttttggattttgtcgattcggggttttcccttccctgcgatatcactgtgactgtatctataattttagtgttttcgttcttagagtaatgaaaatgtgaa

SEQ ID NO: 3970 - DNA, 434 bp, Gossypium hirsutum
  Clone ID: LIB3493-022-P1-M1-H9
taaaaagaaaaaaagagagatggcgtctgtaataaaatctgcaatcttaattctgtcggtgtttttatctgtacgcttcagttcgggtgttaggttgctccaggaacagcccaatgatgaccccaaaaacatggacgctattcctcccattgatgcactcaaccctaccgagttgaatggacccggtgttggcattcacgaagatcatgttgtcccaaaaggtgctgaaattggtactcttggttttggttttgaaggtggtcctgataaatgttgttcttctggatgttccggtaattgtaatcctggtggtttcggtctaccatttcctcaaatttcagaaatcccaagaattgcagaaatcccacaaattccacagatcccacaaattccacaaattccactaatcccacagatcccacaagttccacaga

SEQ ID NO: 3971 - DNA, 237 bp, Gossypium hirsutum
  Clone ID: LIB3493-023-P1-M1-A10
gttgttctttgccatatggatacttcaggttggagctctgatcatggggcttttcgcatgcttggtattaagcaaggaaacactgtttgccatgtattttctcaaggtaattttgtttggattaatcagccatcggatatcgctgccggtgccatataagtgttgaactgttcgatggagcactcatatgccactacatatggagactttgatcccgatataagtatataagagcta

SEQ ID NO: 3972 - DNA, 287 bp, Gossypium hirsutum
  Clone ID: LIB3493-023-P1-M1-A11
ttcaattcctaatttcccaccggtcccccaattaatcaattgttcacggactgtcttcctcctcctttcttccccaatcaacttggttacatccgccccctcaaatccctagctcacaccaccatgtcgccggacggtgatggagccatcaatggctgctgcccttgctccttttcctccggcgagaatggtatccccggatcccacgacgacacttgtaagcactgcacaagatccaaatctttgtcatcttctccctctgctcttggctctgattctgttctctt

SEQ ID NO: 3973 - DNA, 365 bp, Gossypium hirsutum
  Clone ID: LIB3493-023-P1-M1-A12
gttgaagaaaggtctcataacatttgaagccaagcaaagttcagattaggatttagggttttttgttttcttttctttttgtgaaaggcaaaatggatctggatatgaacgtgaacgcccctcactcaatgggcacaacaatcatcggagtcacctacaatggtggtgtcgtcctcggcgccgactctcgtaccagcaccgggatgtatgttgctaatcgggcatctgacaaaattacacagctcactgataacgtctacgtttgccgttctggatccgctgctgattctcagattgtttctgactacgtccgttatttccttcatcaacatacgatacaacttgggcagcctgcaactgtcaaa

SEQ ID NO: 3974 - DNA, 427 bp, Gossypium hirsutum
  Clone ID: LIB3493-023-P1-M1-A2
cccacgcgtccgaaaaaaaacctgttattgaagtcattaccagcattttcacttggaatggctaaattcaagaatgctaatccctcttcttcatcaacttcaatttcagacaagacatttacaagtttaggtaaccttatcaagctccttccgacaggaactgtcttcattttccagttccttaaccctgttttaaccaactacggccattgcagccctgttaacaaggtcctaaccagcaccctcattggcttatgcggcttctcttgtgcattttcttgttttaccgatagttacaaaggcggcgacggtttagatcattacggcatagtaacggttaacggactttggccgtctttcggttcggattcggtcgacttaatcgaagtataagctgcgtataggcgaattcgttcatgcttttttt

SEQ ID NO: 3975 - DNA, 389 bp, Gossypium hirsutum
  Clone ID: LIB3493-023-P1-M1-A5
attttctcttcttattcaactctttctctcttcaatatattgccatcccacttgcagctaactagaatcattccttcaccaaacgactcttcctttgaaacctgaaaatcccttcttcttctttttggcttaaacaagtttcgatcttcttctttttttaattattgatttattcttattgataaaaatggcacttgaatcctcaattttcagtcgacctatttttatttattcaacaaattcctcatctttcatgttttttaatcgaaatttgaagaaccaatcaaagtttttacccaaaaccaatctctacccagctcctgttatatccacctgttcaaacccccaagctttcaaagcttttggattccctaaaaatggtagttttg

SEQ ID NO: 3976 - DNA, 340 bp, Gossypium hirsutum
  Clone ID: LIB3493-023-P1-M1-A6
tgggactatgacagtagctcgggttattactacaatcaaaacaatgggttatactttgatccaaagtcaggattttactattgtgatgctataggcaggtgggtgacacaggaagaggcatactccaaggttcaagcttgatgaaatactaaatcaagagatcctattttgaaaaagccatttacaactttagagacgggaccagctgcagatagcaaaagtgtcgctaaaagtcaaaacaagaccgcaccagggcctgtcattttcgctactttaaaatcccatgagatctgttaaaggtgctgtatcctgacttgcttgtaagagaaaaagacaagat

SEQ ID NO: 3977 - DNA, 450 bp, Gossypium hirsutum
  Clone ID: LIB3493-023-P1-M1-A8
cgacactcatgagccagtacattaagttcgttgctgatcgtgttctggtttcattgggctgtcaaagaaagtacagcgtcgaaaatccctttgattggatggaatttatatctttacaaggaaaagcgaacttctttgagaggagggttggtgattatcagaaagcatctgttatgtcaagccttcaaaacggaggtaaaaactacgttttcaaactagacgaagacttctaaatcacccccatcattctagtttccattttgttgcacactgcaagtattatatagatgctgcctgttattggtatcaaaatattctttgtagtaggtctgtttgtctataatatcgtttcattatgccataaaatccaagacatcagttcactgcctgcaacaataaaagcttaaatcatgtatgatgtatattatgccatggcatcattagactttt

SEQ ID NO: 3978 - DNA, 458 bp, Gossypium hirsutum
  unsure (1)..(458): unsure at all n locations; Clone ID: LIB3493-023-P1-M1-A9
gttgttctttgccatatggatacttcangttggagctctgagcatgtggcttttcgcatgcttggtattaagcaaggaaacactgtttgccatgtattttctcaaggtaattttgtttggattaatcaaccatctgatatacgtgccggtgccatataagtgttgaactgttctatggagcactcaattgccactacgtatgtagactctgatcctaatctaagtctntaagatctcccctaatgttcactaggttatatgggtgtncactgcatggtttatatatatactncctttaaatgtcatcaaatatattctttggagagggttctgtggggtataaatatttctttatttttgccataaaaatccaagacatcacttcatttctctgaaacaataaagcttaaatcatttttgtttgtattttatgccttggcattaattgactttttcta

SEQ ID NO: 3979 - DNA, 345 bp, Gossypium hirsutum
  Clone ID: LIB3493-023-P1-M1-B1
ggaggatgaagatgaagaactgagcagtgccctggaaaatggggttgccataaatgataaaacgagttctccatctccaccaaatccaaaaacaagagaaaactttaagacaaagagggcttacttttattgggtaacaagggaacaaggctcttttgattggttcaaaggcatcatgaatgaagtagctgaaatggaccatgatcatgtcattgagctccataactattgcaccagtgtttacgaagaaggtgatgctcgctctgcgctcatcaccatgctccagtctctcaaccatgctaaaaacggtgtcgatgtcgtctctggtacacgtgtaaaatcgca

SEQ ID NO: 3980 - DNA, 282 bp, Gossypium hirsutum
  Clone ID: LIB3493-023-P1-M1-B10
cggacgcgtgggcggacgcgtgggcggacgcgtgggtttggaaattcagaaaactggtgtaaaatagaacataacttagcagtttctttctcattgttgttgctcactgatttttctcatgtattttttagctattttagtattgttaactgagttgataatttttaagagtttattgatcatgaaatcacgtgtaatataattacttaatccgaggttagggttgttgaattttttatatttaaacattattttaattcaatgaaatagatttgcatttgc

SEQ ID NO: 3981 - DNA, 178 bp, Gossypium hirsutum
  Clone ID: LIB3493-023-P1-M1-B11
cagttcctgaccctcatgctggaactcccccttcaggttcacatggcacaccaccatcttgcaggaggtggaacacctccctctcatggaaccccatcacatggaggtggttaccacccttgaccaacaccattatcgccttctggtggaactgaggggatcactcctaatagccctt

SEQ ID NO: 3982 - DNA, 148 bp, Gossypium hirsutum
  Clone ID: LIB3493-023-P1-M1-B12
cggacgcgtgggctcttctccctctttcctttcctctcccaaatccttacctttattcttcaaacccaaaattaacacctccaaatccttcaatcttcactttcatgctaatgttgcctcctcttccactttgactgctatggaagtc

SEQ ID NO: 3983 - DNA, 372 bp, Gossypium hirsutum
  Clone ID: LIB3493-023-P1-M1-B2
cccgattccggtgtgatgcccatccagacagtgtatagcagcagcggttgggacaactatgcttgggcattcaaaacacaatctgatgcggtcatgttgattattcacaatcctggagtggaggaggatcctgcttgtggaccactcatcgatgcggtagctatcaaggctttatatcctcccagacccaccaacaagaacataatgaaaaatggtggttttgaagaaggtccttatatattccccaacactccatgggggtcctaatcccacccaacattgaggatgataattctcctctccctgcctgggtagtcgaatccctcaaggccgtcaagtacatcgattcagcccattacttcgtgcctcaag

SEQ ID NO: 3984 - DNA, 513 bp, Gossypium hirsutum
  Clone ID: LIB3493-023-P1-M1-B3
aacaacaaagaaactgaaacacatcggaaaaagagaaaacatgggttggatcggagacaccgtagactccatcaaatcaatccagatccgccagctcctcacccaggtcgtcagccttggtatgattgttacgtctgccctcataatatggaagggattgatgtgtgtcactggcagtgagtctcctgttgtcgttgttctttcaggaagtatggaacctggcttcaagaggggggatattttgttcttacacatgagtaaagatccaattcgagctggagaggatgttgtttttaatattgatggccgtgaaatcccaattgtccatcgtgtaattaaggtccatgaaaggcaagatacttggaaagttgtgtcctcaccaaaagagacaacaattattgggatgacaggcttttatatgctcaagtcagcaatatcttcaaaggcaccatatcatgggccaaagctggtgggttcttggccgtattgtgggtgggtcactataatcatgac

SEQ ID NO: 3985 - DNA, 408 bp, Gossypium hirsutum
  unsure (1)..(408): unsure at all n locations; Clone ID: LIB3493-023-P1-M1-B4
aaagaacctcacaagtattttgatcaagtaatcatcaccgtccgttcgggtgatggcggccatggtgccgtccttaccatgcctagccaacaacgagctacgaagtggcaaggaaaacatgagaataaagagaagtcaaagaagaaactttcgtataaaagggattttgatgggtcacttatccttccagtgggtggtcatggtggagacgtagtaatttatgctgatgaagggaaagatacgttattggaacttcataagaagagtcgacataatgcaaagcgtggtggaaatgtcgctggtantggtgttttaacttctcagctgcgtgatggccttgctgccccaactttgcgtattcctgttcctgttggcactgttgtgaaacgcaaacctgggaagttattg

SEQ ID NO: 3986 - DNA, 400 bp, Gossypium hirsutum
  Clone ID: LIB3493-023-P1-M1-B7
aaaaagactaatagcgtaaaaagagtaaagggaaacgctttacttattggggcgtagggttttgatccaacaaggataattgagagaagatgatagactttgctcgtgttcaaaaggagctacaagaatgtagcagagaaaaagactcttcgggcattagggtctctccaaaatcagacaatcttgctcgcttgactggcatcatccctggtccccttggcactccttatgaagggggctcctttgaaatcgatatcacattgcctgatgggtatccatttgagcctcccaaaatgaagtttgtgacgaaagtttggcacccaaacatcaacagccaaagtggggcgatatgcctggatatattgaaggaccagtggagttctgcactcactcttaagac

SEQ ID NO: 3987 - DNA, 351 bp, Gossypium hirsutum
  unsure (1)..(351): unsure at all n locations; Clone ID: LIB3493-023-P1-M1-B8
atttgagaccaccaaatactactgcactgtgattgatgcgcctggacaccgtgactttatcaagaacatgattactggtacctcgcaggctgactgtgctgttttgattattgattccaccactggtggttttgaggctggtatctccaaggatggtcagactcgtgagcatgctttgcttgcttttacccttggtgtcaagcaaatgatttgctgttgcaacaagatggatgccactacccctaaatactcgaaggctaggtatgatgaaatcgtgaaggaagtctctncctacttgaagaaggttggatacaacccttacaagaattcatttggttccatttctagttt

SEQ ID NO: 3988 - DNA, 282 bp, Gossypium hirsutum; identical to SEQ ID NO: 3980
  Clone ID: LIB3493-023-P1-M1-B9

SEQ ID NO: 3989 - DNA, 409 bp, Gossypium hirsutum
  unsure (1)..(409): unsure at all n locations; Clone ID: LIB3493-023-P1-M1-C1
cggcctctctgcttcatctatcttttatctaatagctcaagaccagaaaggatatcgaacaatggtgaagatctgttgcatcggagccgggtatgttggtgggccaacaatggctgtcattgcactaaaatgcccagaaattcaagtagctgttgtggatatttcagtgccaagaattagtgcctggaatagtgatactctccccatatacgagccagggctcgacgaggtggtgaagaaatgcagaggaaagaaccttttgtttagcagtgatgtgggaaagtatgtttctgaggctgatataagtgtnggttcggttaacacacccaccaaaactcaaggccttggtgctgggaaagccggtgatctcacctactgggagagtgcggctcgtatgattgccgatgta

SEQ ID NO: 3990 - DNA, 318 bp, Gossypium hirsutum
  unsure (1)..(318): unsure at all n locations; Clone ID: LIB3493-023-P1-M1-C12
gaaaggatacaagtgggattgagaatagatattttgatcttggatgtgttcccatagcaatttgtgtggtttcaacaatgttagaattgagatctaacaggtccatttactcgaaatcggtacgaggtattgggttggttttacacggaacatggtttgtgcaagtgggattttcattttacactaatttgatggttcatggatgtagcttacatgaaaatagtttagggaattatactattaaatgcagaagtcactctgattatcatagagcatggtctattgccacattgtanttcaattgccatctttcttttc

SEQ ID NO: 3991 - DNA, 322 bp, Gossypium hirsutum
  unsure (1)..(322): unsure at all n locations; Clone ID: LIB3493-023-P1-M1-C2
aaaagctcccaaaggaactaaaactaattggattatgcatgaatatcgactcattgaaacttctcgtaaaagtggtagctccaagttggatgattgggtnttatgtcgaatatacaagaagaattcaagtggtcaaaaacctttgtcaagtgtttcaagcagagagcaaagcacgaatgggtcatcatcatcgtcttcttcacaactggatgacatgcttgagtcattgcccgagttggacgatcgtttctttgctttgccacgcgttaactcgttcaaaacgctccaaaacgatgtgaaaactggggtttcaaagtctggg

SEQ ID NO: 3992 - DNA, 358 bp, Gossypium hirsutum
  Clone ID: LIB3493-023-P1-M1-C3
ggaacgtgaaattctacctatccataaaggtgaaaattgcccccagaggattgttacttgtgagttttgcgagtttcctttgcctgctattgatctggccgagcatcaggaggtatgtgggaaccggacagaactctgtcatctctgtaacagatacgttagactgagagaaagatataaccatgaaagtcgatgtaatggtattccagaagaccatgtcggatcttccaggaatgttaggccagttgaaagggagcaaggagctcggagaaggcagccgccagaatactcacggaaacgacttctattcaccgttgcaataagccgggaatgctgttttaattaggatcactttttt

SEQ ID NO: 3993 - DNA, 515 bp, Gossypium hirsutum
  unsure (1)..(515): unsure at all n locations; Clone ID: LIB3493-023-P1-M1-C4
ataacatgaaattctacctatccataaaggtgaaaatttcccctagaggattggtacttgtgagttttgcgagttaactttgcctgctattgatctggccgagcatcaggaggtatgtgggaaccggacagaactctgtcatctctgttacagatacgttagactgagagaaagatataaccatgaaagtcgatgtaacgagataccagaagaccatgtcggatcttccaggaatgttatgccagttgaaaggtagcaaggagctcttagaaggcagccgccagaatactcacggaaacnacttctattcaccgttgcaataaccgggattgctgttgtattaggatcacttttttttcataagacgatgtgaaccggtccattattttatccgagtagaggatgctcattggcttgtgtttatcaacctggagagcttacatatttcatatttgtatctcaagatattctatagcgtataccattgatactgtattaacacttaatttaaattt

SEQ ID NO: 3994 - DNA, 178 bp, Gossypium hirsutum
  Clone ID: LIB3493-023-P1-M1-C6
atttcatcagtacctcattgtggggagggctgtatatggaaagcggatttgataataagctttggagtgtggtgcattcaccggatccttgatctttcactgatggaaagccgaccagagctgtggggaaaatacacatatgtgcttaatcggcttcagggtgtgatagatattgcat

SEQ ID NO: 3995 - DNA, 380 bp, Gossypium hirsutum
  Clone ID: LIB3493-023-P1-M1-D1
gaattactgctcacgcgcttgccaagcgcttgattggaagctgcgccacaaagccgagtgcgcgccagtagagcgatggcttgatgaataaggcgatggtggcgagggtaacggtgcggtacatgggaacgatgacgttatcgccgaaagttaaaaacgattaactgcttatggtaattaattttttactattaggtttaaggccacgagaagaaaaaaaaaagtggaaatggagaacaggaggccagctttggttgggtatttggaggttaaaatcaacttttaagatgacgatagtcgctgaaacgacacagtttagttctatgtggattgtaagaggaggggggtaatccgaaaatggtcccacttgtacactatag

SEQ ID NO: 3996 - DNA, 367 bp, Gossypium hirsutum
  unsure (1)..(367): unsure at all n locations; Clone ID: LIB3493-023-P1-M1-D10
gttgaaaccctagtccttcctttcccttctcacccttcaatccctcctggagttgaaaacatggtgggtttccctatttcttttggacccatcttcatggaagccatggctgagctttacaatcctctctttcaatggtttcaaactcacccatcccctcctgttgctattatctctgacatgttactcagttcttgggtcaataccttatcttctaatctgaatattcaccatttaactntcatggttaccaatgcaaattcaacgttgccattggtgcgaaaggggatgaaaaaattgtctccctcgatagaacaattcgctaagaatgcagttgtgccgagtctcaaaagttgggggatcattt

SEQ ID NO: 3997 - DNA, 331 bp, Gossypium hirsutum
  Clone ID: LIB3493-023-P1-M1-D11
gaaacagatcctctgttcaactccgggcgtggatctgctcttacggataatggaacggtggaaatggaagccagcattatggatggcccaaagaggagatgcggcgccgtttcaggcttaagcactgttaagaaccctgtctcccttgcccgtcttgtcatggacaaatcaccccattcttatctggccttctccggtgccgaagactttgccaagaaacaaggagtggagttggtggacaatgaatattttattacggaagataacgtggggatgcttaagttggcaaaagaggcaaactcgatcctgtttgattaccgtatcccaacga

SEQ ID NO: 3998 - DNA, 375 bp, Gossypium hirsutum
  Clone ID: LIB3493-023-P1-M1-D12
agtctatgcagctgagaaaacctgcatttgagaagcaccactttcatggctaccaaaatcctagcatcttcaagccatagtttcgagaacgaatgcaaggaaattcacgaatcacggggaagatggaaccacttgattcgagctttggtcactcggactcagctcgaatgcaggggaatcagagagacttacagggacatgtatggggaagatttgataactctgctgcaaaaatctagccttcgaaatcagcctggtgtttcccccaaaacttgcgcagctttgtccctttggatgcttcatcctcatgaacgtgacgccattggtgctcgggaagctcttctgcaagataatgattctaattatcagtctctg

SEQ ID NO: 3999 - DNA, 384 bp, Gossypium hirsutum
  unsure (1)..(384): unsure at all n locations; Clone ID: LIB3493-023-P1-M1-D2
gccaagccagaatccctgtaattagtttcgtttcgaaaataagtgatacgcgtttgtttgttgaagtgagggacgttgataaggaaaaacagaaaagaaattagaggaaatgggaagttcgtcaaatgaagatttctcggtggtggtgcttgcttcagatttgggcatagacgcccgtcctttcttatcgaaccaagacactgaaattgaagaccaagacaactggcatgactgttcgcaggatttttccgatgaagatttctccgacctcgagttcctccagttcgtctgccttcagggctctgataaaatgggtaatcgcattttacgcattgtcggaaagtactttcccgctccagtgttagcggngagcgactgaagaga

SEQ ID NO: 4000 - DNA, 98 bp, Gossypium hirsutum
  Clone ID: LIB3493-023-P1-M1-D3
caagatctggttttgatctgatcagatcggataaaaatatcaaaacatggttgggatatcaccgaagaaaagcgattataccaaatactatgagatta

SEQ ID NO: 4001 - DNA, 138 bp, Gossypium hirsutum
  Clone ID: LIB3493-023-P1-M1-D4
cctgagtcgttttataccagtggaggcttgaaattaagggttgtgtggggcggtgggctcgttaatcgcagcatcagcaatgcattaattgctgcactccataattgcagagcataagacgctggatagcttggtttt

SEQ ID NO: 4002 - DNA, 202 bp, Gossypium hirsutum
  Clone ID: LIB3493-023-P1-M1-D5
ggagcacctacttcgagcaaatgctgtgctttgctccaaggcttggcgtgattgagaggctgccctttgcctttgcaccgccattaaagccaatgtgcttggggccaacctcaacatccctattacccttagcttactccttagtgcatgtcagaaggaaatccctccaggcttcaaatgttgatatttttttttaagaagc

SEQ ID NO: 4003 - DNA, 443 bp, Gossypium hirsutum
  unsure (1)..(443): unsure at all n locations; Clone ID: LIB3493-023-P1-M1-D6
ggatggcatactgaccacggctccttgacaggtctgacatgcgccatgtttaagaggaacgatgtagaaatatcttgtcctgatagtgctgctggcctttatataagaacacggagtggtgaaattgtcaaagctacttttggagaaaatgaaatagcataccaaattggtgaaaccactgaaattctttctcaaggatatctttgtgcaacacctcattgtgttcgggcaccaaaaggaaaggaggcttctggtgttggtcgatcaacatttgcattatttatgcaacctgattgggatgaaaaactcaaattttctgaggacgtttatattcataaagagctgataccatcaaatgacagtcttacttttggagaagtttcanagacgctacttgacaaatattaccacatgaaaacggtaagaactggaaatattttctc

SEQ ID NO: 4004 - DNA, 423 bp, Gossypium hirsutum
  Clone ID: LIB3493-023-P1-M1-D7
ggtaggagagcctatactattacatgggcaatgcaatatatcaatctgttcatgattaacattgggtttctcattttgggtggttctgctttaaaggcttgttttgcccttttcaattatgagcacaccatgaagcttccatactgtattgccataactgggtttgcttgtactttgtttgccatatcgacaccgcatctgtcagctctaagagtatggttgggatgttcaacagttctcagtttgatatatattatcgtggcatgtgtgcttgcggctaaagacggagctaatgcaccaccccgagattatagcatacatggggaatcttctagcagagtttttacaactataggagcatctgcaaatcttgtgtttgcattcaataactggaatgttaccagaaatacaggcaacagtgag

SEQ ID NO: 4005 - DNA, 418 bp, Gossypium hirsutum
  Clone ID: LIB3493-023-P1-M1-D8
gtaaccgctctaactgcttcaatcgtaactgcaacgacagctccgatgacgatatggatggtttcggtttcagcgactccaatctctcttcttcagctgaagcatctgaaattctaaagagcttggttccttgtgggagtgtgaatgaaaggaatttactggcgcatacagcgagaatcatggagaagaacaagatctctaaacgtaaagatgatatctgcaggaagattgttattgatggattacttgcctttggatacgatgcttctatctgcaagtctcgttgggaaaaatctccctcttatcctgccggggaatatgaataccataatgttataatcgacggggagcgattggtgatcgacaatcatttcagatcagaattcgaaatcgcacgatcaacaaagacctataaatc

SEQ ID NO: 4006 - DNA, 434 bp, Gossypium hirsutum
  Clone ID: LIB3493-023-P1-M1-D9
gttgaaaccctagtccttcctttcccttctcacccttcaatccctcctggagttgaaaacatggtgggtttccctatttcttttggacccatcttcatggaagccatggctgagctttacaatcctctctttcaatggtttcaaactcacccatcccctcctgttgctattatctctgacatgttactcagttcttgggtcaataccttatcttctaatctgaatattcaccatttaactttcatggttaccaatgcaaattcaacgttgccattggtgcgaaaggggatgaaaaaattgtctccctcgatagaacaattcgctaagaatgcagttgtgccgagtctcaaaagtttggggatcattttcaacacgtttttggagttagatggtgataaaaatggaatcatcaaggaggaattcacagaacatga

SEQ ID NO: 4007 - DNA, 393 bp, Gossypium hirsutum
  unsure (1)..(393): unsure at all n locations; Clone ID: LIB3493-023-P1-M1-E1
cttctcatctctgctttttcccccttttatctttcttcttctttttcttcttcttcttcttcttcttcttactccagccgactttttccggcaaaacggtgtcagatctttgtgatctatagccggaagtttcatttcgagttcgacgatctcatccttcgatctttccactttcttcagcctaccatgaatcccgaatatgactatcttttcaagctacttcttattggagattccggtgttggaaaatcttgccttcttttgagatttgctgatgattcatatgtagaaagttacantaagcaccatgnggttgattttaaaatacgcactgtggagcaggatgggaagaccattaaacttcaaatttgggacactgctggtcaagaaaga

SEQ ID NO: 4008 - DNA, 345 bp, Gossypium hirsutum
  unsure (1)..(345): unsure at all n locations; Clone ID: LIB3493-023-P1-M1-E10
cgtttatgcctgtctctcgccaagcaagcttcaaatttactagaaaatgcctttcaataatataaaaagaaagcacacagatctgctattttaattccacccccaaaagaaaaagctatgtgttcactggtatcacttgtgcatacagcttagcatttctgaatatcaaaaagaaagaacangaaccgcaaattctgcgatgagctttgagagggaagatttggtctttagggcccttacacctaaatagtatagactgggaaaatcaaatcatcgaaggtctatagcagctaggttggtcagggacctatattttggaacgagatcgtcaagaaaaacgtcaag

SEQ ID NO: 4009 - DNA, 415 bp, Gossypium hirsutum
  Clone ID: LIB3493-023-P1-M1-E11
gagcagcagagtttcacgcctctaaggccagagattccaccatggctggctagccaaccgatgctcggggctggtcctggcccaccacaccctatcgacctttcctccccctcatcatcaatattctccccgagattagatcatcaagatttaacacttcatggaacccccagcgctaaccctagtcttgtccccacactccctccataccatcacacagcactgccttcccctcacatgtcagccactgcattgctccagaaagcagctcatatgggtgcgaccatgagccgtaaatctgggtcatcatcagtaccgtccactgttgcagcagcagcatctgcctctttgatgagaccccaccaacaaactcacgtgtctaccgattctgctggcccttacaacaacacaacaa

SEQ ID NO: 4010 - DNA, 485 bp, Gossypium hirsutum
  Clone ID: LIB3493-023-P1-M1-E12
gaaacctcctcgaattatcctccacgtaaggcgcattttagcaaaaagggcccggcatccgatagccgaagccaacgaggagagccccttcggcactttaactccggacgaattctatgcccgccactcagtgagtcactcttccgagttcatcactaacgctcgcggtctcaaactcttcacccagtcttggaccccactagatactccgatcaccggaatcgtcgccgttgtccacggattcaccggcgagtcgagctggttcctccaacttacctccgttcttttcgccaaatcgggattcgccacgtgtgcgatcgatcaccagggccacggattctccgaaggccttgacggactagatactcacataccaaacatcgaccgcggtgtcgacgattgcattcagtgctttgactcctttcgtgctcgtcacgcgccggatttggccgcctttatgtactcggaatcgcttggcggagcta

SEQ ID NO: 4011 - DNA, 349 bp, Gossypium hirsutum
  Clone ID: LIB3493-023-P1-M1-E2
gttctccttccgatttttcattttttcttttatgggttctcaccggaaaatcgtacttgggtctcaccggccgccgagaaaaacaaagcaaatatagagtgaaacccgactatttttcctcatttctttcttgtgttccattttttcaagtgaaatcccaaaatggttgtaaattttagctttgttttttttagtttcggttctgatattgtgtttgggagtgacctcagagcctgttcaagacaagcaagctctccttgcgttcctttcaaagaccaaacactcgaaccggatccaatggaactcatcaacttcagcctgcaattgggttcgcgtccaatgcgatgcg

SEQ ID NO: 4012 - DNA, 318 bp, Gossypium hirsutum
  Clone ID: LIB3493-023-P1-M1-E4
acgctgaatgggtaaaacagagatttctttcgagatccatgaacccattctttagagcgcggccgaagtttagagcaaatagcggatcctgccaagactgatgccatgaaattgacgataccgtgaaaatgaggcctcttgattcgagctttggtcactcggactcagctcgaatgcaggggaatcagagagacttacagggacatggatggggaagatttgattactctgctgcaaaaatctagccttcgaaatcagcctggtgtttcccccaaatcttgcgcagccttgtccctttggatgcttcattctcatgaa

SEQ ID NO: 4013 - DNA, 170 bp, Gossypium hirsutum
  unsure (1)..(170): unsure at all n locations; Clone ID: LIB3493-023-P1-M1-E5
caatacgcaacaacataatggcatctacacttttggcaaccgtggcaggcactctgagttcgttgattagtgttttcgtaaccagcancttggactctagcaacacaacttcagaaatatattatggcaataagagtcgtatactctcttcaatcaagtatttttccatc

SEQ ID NO: 4014 - DNA, 352 bp, Gossypium hirsutum
  Clone ID: LIB3493-023-P1-M1-E7
gtgaggaaaaagaagcttcaatctttggttgttaagtgggtgaaacaaaaaaaaaaaatggagggcaaagaggaggatgttaagctaggagccaacaagttctctgagagacaacctattgggacatcagctcaaacagacaaggactacaaggagccaccaccggcaccattgtttgagcctggtgagctcaagtcatggtctttctacagagccggaatcgctgagtttgttgctaccttcttgttcctttacatcactgtcttgactgtcatgggtgtctctcaatctaagaccaaatgtactactgttggtattcaaggcattgcttgggcccttggtggcatgatct

SEQ ID NO: 4015 - DNA, 394 bp, Gossypium hirsutum
  unsure (1)..(394): unsure at all n locations; Clone ID: LIB3493-023-P1-M1-E8
aaaaaaaccatttatttttcttcagctctaagcgacaagaacgatggctgacttcaagaaagccactgctttgattctcacagtggctttgcttgtgaatctcgctttaatggttgatgctgatggtgatgatgatatgaagattacagtcactacacataccggccaccatgacctttttctgtgttttgtgagctctcatcttgggctttctacgtagcctcanaccctgtctaagacaattcctccttgtttctttacacttctgacacgactgacttggttcgtnttcaatttaactccaaatcttctactcttaatatgcatggcattgcttgggcctctaacggcattatttttgatcttgtttattgccccgctggggttcaggtgg

SEQ ID NO: 4016 - DNA, 350 bp, Gossypium hirsutum
  unsure (1)..(350): unsure at all n locations; Clone ID: LIB3493-023-P1-M1-E9
cgtttatgcctgtctctcgccaagcaagcttcaaatttactagaaaatgcctttcaataatataaaaagaaagcacacagatctgctattttaattccacccccaaaagaaaaagctatgtgttcactggtatcacttgtgcatacagcttagcatttctgaatatcaaaaagaaagaacaagaaccgcaaattctgcgatgagctttgagagggaagattttggtcttttagggcccttacacctaaatagtatagactgtgaaaattcaaatcatcgaaggtctattncagctaggttggttcaaggcacctaatttttggaacgagatcgccaagaaaaaccgtaag

SEQ ID NO: 4017 - DNA, 461 bp, Gossypium hirsutum
  Clone ID: LIB3493-023-P1-M1-F1
cagaattactcatcttctgctccttacgtaggtcctggtgcaccgtcttcaatgtatatgggtgtaccaccttatgggtcttcccttttcaatggtccttctattcctccatatgaagctcctttttctggaggatcagcttatcattacaattatggcaatcgtcttcccggtggcagtccctttcagccgttgcatatgtctggaccacccccttattctagtggctctatgattggaaatggtgggatgtatggcatgcatcctttgatggaccggtatggcttgggcttgcccatgggtccccctccaatgggaccaaagccagggttttttccagatgataaatcacagaaaaagggtgctgatgctacacgtgataatgattggacatgccctaaatgtggcaatattaacttttcttttgaactggctgtaacatgccggaatgcaacacacct

SEQ ID NO: 4018 - DNA, 438 bp, Gossypium hirsutum
  unsure (1)..(438): unsure at all n locations; Clone ID: LIB3493-023-P1-M1-F10
gtgatatccgcggtaggttcgatgcagttagcagatcaagttaagatcattgctgccattaaagaagctgggaatgtgaagaggtttttcccatcggaattcggaaatgatgtggaccgggttcatgctgtagagccagcgaaaacagcattcgcaaccaaggctcaaatccggcgtgctattgaggctgagggaatcccctacacctatgtgtccagtaactgctttgcaggctattttcttcctggtttgtcacagccaggagccactactcccccaagagacatgttggtgatcccaggcgatggacatcctaaagctgttttcaaccatgaaagtgatattggaacatacacaatcaaagctgttgatgaccccagaacactgaataagatcctatacattaggcctnctaaaaacacctatttatttaatgag

SEQ ID NO: 4019 - DNA, 417 bp, Gossypium hirsutum
  Clone ID: LIB3493-023-P1-M1-F11
cggacgcgtgggctccttaaaaaaaatctctccaaaaaaatggtcccaattccctttctttttctagcattgaaaattctgaaaaaattattatgaggcttcagcttagcaatctcattatatttgcagatggaaggcaatgataattccacttctaaggattactacaaaattttggaagtagattatgatgcaactgatgagaacatcaggttaagttaccggaagcttgctctgaagtggcatccagataagcacaagggtgatagtgctgttactgcaaaattccaagagataaacgaagcttacaacgtgttaatcgatcctgataagcgctttgagtatgatttaactggaatatatgaaattgataagtatactttgcgggaatatcttggcagatttaagggaatgatt

SEQ ID NO: 4020 - DNA, 420 bp, Gossypium hirsutum
  Clone ID: LIB3493-023-P1-M1-F12
agcaaatatgctgatgagttggctaaaaacgctgcttacattggaacccctggaaagggtatccttgctgctgatgaatccactggcaccatcggcaagcgtctttcaagtattaatgtagagaatgttgaagacaacaggcgtgctctccgtgagctcctattcacaactcctggagctcttcagcacctcagtggtgttattctctttgaggaaaccctttatcaaaaaaccgcttcgggcaagcccttcgttgatgttttgaaggaaggtggtgtcctccctggcatcaaggttgacaagggtacggttgagcttaatggaacccatggcgaaactttcacccagggtctagatggccttgcacagcgatgccagaagtactatgaagctggtgcccgctttgctaaatggcgtgct

SEQ ID NO: 4021 - DNA, 433 bp, Gossypium hirsutum
  Clone ID: LIB3493-023-P1-M1-F2
aatccttcagccgaagatgctgatgaggatgaaggtgttgatgaccaatctgtgaaggttgttgacattgttgacactttcaggcttcaggagcaaccccctttcgacaagaagcagtttgtcgtgttcatgaagaagttcatcaagaacttgacaccgaaactggatgcggaaaagcaagagtccttcaagaaaaacattgagggagcaaccaagtttttgctttcaaaattgaaggaccttcaatttttcatcggagagagcatgcacgatgatggatgtttggtatttgcttactacaaggatggtgctgttgacccgacatttttgtactttgcctatgcattgaaggaggtcaagtgctgaggtttgaagcaaagaaaaaaaaagtggttgctgaagaaattagtcctttttattattgcttttggct

SEQ ID NO: 4022 - DNA, 331 bp, Gossypium hirsutum
  Clone ID: LIB3493-023-P1-M1-F3
attctcactgcctgtcctttctatagcagaagcattcttcaatggctggaaagagcaaggttttagtcattggaggcactgggtacatcggaaagttcattgttgaagccagtgtgaaagagggtcatcccacttttgctttcgtaagagagggttcagtttcagacccagttaagggaaaggttattaacaatttcaagaacttaggggttcatctgttgtatggggatctttacgatcatgagagtctggttaaggcaataaaagcaagctgatgtggtgatattccgcggtaggttcgaatcagttagcagaatcaagttagatcatt

SEQ ID NO: 4023 - DNA, 203 bp, Gossypium hirsutum
  unsure (1)..(203): unsure at all n locations; Clone ID: LIB3493-023-P1-M1-F4
attcttactgcctgtcctttctatagctaaggcattctacaatggcggggaggagcatggttttagtcattgtacgcactttatacatcataaagtgcattgttgaagccagtgtgaaagatggtcatacaacttnagcttttctaagatagggttcattttcagacccatttaagggaaaggttattaacattttcaataac

SEQ ID NO: 4024 - DNA, 189 bp, Gossypium hirsutum
  unsure (1)..(189): unsure at all n locations; Clone ID: LIB3493-023-P1-M1-F5
cttaagtgaaggactcaaagacccttctctttggtgaaaagcctggacagttttcggtatcagaaaccctgaggaaatcccatgggctgaggctggagctgagtatgttgttgagtctactggtgtttgtactgncaaggtcaaggctgctgttcacttgatggtgggtgtgatatatgctttaattta

SEQ ID NO: 4025 - DNA, 457 bp, Gossypium hirsutum
  Clone ID: LIB3493-023-P1-M1-F6
gccggatatggcggtggcaactggacaaccgacgtaagaagacgaaaaaggtacaacctggttgatgcagtatctaggaacactgttcaggtttatcctaaaagctggacttcaattttggtctcattggacaacaaaggaatgtggaacttgaggtcgcaaacctggtcaaagcggtacttaggccaagaagtctatcttagagtctggaacgacgagaaaagcttgtatactgaaactgatattcctccaaatgcactattttgtggcaaggcagttcaatcttagaacaccattaatgtcgtcttggtgtaatctacatcagctaatttattttctgatttttttgttctttttttaggagggtgggactgtttaggaagggaaataagacttaaaaatatagtaaatttattgaggctagattttaaaaaaaaatttatattaattgacaatt

SEQ ID NO: 4026 - DNA, 251 bp, Gossypium hirsutum
  unsure (1)..(251): unsure at all n locations; Clone ID: LIB3493-023-P1-M1-F7
aatcgaccctgttcgaccatgaatccgagggttttgccattcttaagcctgacaatccctatttgagcttcgatttcttcaaagcaaacaaggattcgagggcctttatcacgataaggatcttccctctcctttatttttgttttttcactcctatgataacgaatatcaaagaggatttagcaaaangaagaagaagaatgatctttcgaattaccactttaaaacaagctgttatttaccctttttgg

SEQ ID NO: 4027 - DNA, 401 bp, Gossypium hirsutum
  Clone ID: LIB3493-023-P1-M1-F8
atttttcactctcttccactcaatcaaatcccagcttagcagcctcacaaaatttttcgttaaaaaacccatctttctgattctaaactcaccccgatccatctcttttgcatataccttcagtcactaagcaatagcagccactactgcaaatggcttccaacaaaacctgtgctgtccttacagttttctctcttcttcttttcaacttatcattcaccaatgcttgccattcatgcaagccaccaaagcccattccaccacctgctgcatgccctccaccaccagcaaagcctgcttcttgccctaaggacacattgaagctaggtgtttgtgctgacctacttggactggtaaacttagtggtgggaacaccttcttcgagccaatgctgtgctttg

SEQ ID NO: 4028 - DNA, 300 bp, Gossypium hirsutum
  Clone ID: LIB3493-023-P1-M1-F9
gtgatatccgcggtaggttcgatgcagttagcagatcaagtgaagatcattgctgccattaaagaagctgggaatgtgaataggtttttcccatcggaattccgaaatgatgtggaccgggttcatgctgtagagccagcgaaaacagcattcgcaaccaacgctcaaagccggcgtgctattgaggctgaaggaatcccctacacctatggtgccaggagctgctttgcaggctgttagcttcctggttggacacaagcaggagccactgctgctctcagagacaagttggtgatccca

SEQ ID NO: 4029 - DNA, 298 bp, Gossypium hirsutum
  unsure (1)..(298): unsure at all n locations; Clone ID: LIB3493-023-P1-M1-G1
ggaatgtatgattctttgaagcctgttgttttggttggtggattgcaggatagtttcttggcaagtttcttgctgggttggggtatcacaataggtgctggactggcatcttatccaattgatacggtacgtagaagaatgatgatgacttctggagaagcagtgaaatacaagagctcgatggcagcattttctcaaatcatcaagaatgaaggtgccaaatcgctgttcaagggtgctggtgcaaacattcttcgtgcagttgcangggctggtgtgcttgctggctatgacaagc

SEQ ID NO: 4030 - DNA, 120 bp, Gossypium hirsutum
  Clone ID: LIB3493-023-P1-M1-G10
taaattttctatatttttattttggttttaaatggttgcattaaatttaagaacatggagacatgtaggaaggttttgattgcttaaaagtttaataccatttgatacctttttattatt

SEQ ID NO: 4031 - DNA, 369 bp, Gossypium hirsutum
  unsure (1)..(369): unsure at all n locations; Clone ID: LIB3493-023-P1-M1-G11
tggcataattcagttcaccagggacatctctatggcaggccgtgccaaagacagggataaagctggcaaaactaccaaacactttgccactgagagagaaaggagagtccatctaaatgacaagtaccaggctttaaggacaatggtccctagtcccaccaagaatgatagagcatccatagttggagatgctatagactacatcaaggaacttcttggaactgttcgtgagcttcaaatactggtggacaaaaagagatgcggccaagaaaggagcaaaaggcttaagactgaagatgcggctagtgctgctgatgcangggatgttgagatcaagtctttaggtgatccaaaacaatgctataatac

SEQ ID NO: 4032 - DNA, 478 bp, Gossypium hirsutum
  Clone ID: LIB3493-023-P1-M1-G12
cgtagccaagattaccttgcgatagcaaaaattatctgtaaggaaaaaatggagataactaatatcactgaatatgaggccattgcaaaagagaagttacccaagatggtttatgactactatgcatcaggtgcagaggaccagtggactctcaaggagaatcgaaatgcattttctaggattttgtttcgaccccgcattcttattgatgttagcaagattgacatgaccaccactgtcctgggattcaagatttcaatgcctatcatgattgctccgactgctatgcagaaaatggctcaccctgaaggagaatacgcgacagcccgagcagcttcagctgcaggaacaattatgacactatcctcgtgggctacttccagcgttgaggatgttgcttcaacgggacctggcattcgctttttccaactctatgtatacaaagacaggaatgtggttgcacagctcgtgagaagag

SEQ ID NO: 4033 - DNA, 301 bp, Gossypium hirsutum
  Clone ID: LIB3493-023-P1-M1-G2
gtccaagacgttgtcctcttttccgattctaagatcgctatatctggttcctgggatggtgagcttcttctctgggacttatctgccggtaccttaactcgacgttttgtctgccacaccaaagatgttctgtccagcggcttttcaattgacaaccggcaaattgattctggttctcgagatcgaactatcaagctattgaatacccttcgggaatgttaatacacaattcaagaaggtggcgctcataccgtctgggttagctgcgttcgatttatgccaaatacttttcaaacgaaca

SEQ ID NO: 4034 - DNA, 67 bp, Gossypium hirsutum
  unsure (1)..(67): unsure at all n locations; Clone ID: LIB3493-023-P1-M1-G3
atcgtgggaaagaatctatattatgttnattttgactacaaaaaaagagactgtggtatttattctc

SEQ ID NO: 4035 - DNA, 173 bp, Gossypium hirsutum
  Clone ID: LIB3493-023-P1-M1-G4
cgaagagactcccttcgccaaacttggatgcctacaggggaaaaacggaagaaattagagaaagagaaagggatagtcataagatttgtgatagggcacagtgcaacaactgtgtggtgttctttcatagcattgtacaaacaacaggcttgctctccgggttttttaaggct

SEQ ID NO: 4036 - DNA, 95 bp, Gossypium hirsutum
  unsure (1)..(95): unsure at all n locations; Clone ID: LIB3493-023-P1-M1-G5
tccgatcccggtcacccacgcgtccgcttttcttccgtttggctcaaattcaaatnctctcgcggatccggtgcgaggtgttcaagggatcaaaa

SEQ ID NO: 4037 - DNA, 72 bp, Gossypium hirsutum
  Clone ID: LIB3493-023-P1-M1-G6
tttcggttcattgcattaacctcttgaaacataattgttgccaacacttttggaacatcacatatctaatat

SEQ ID NO: 4038 - DNA, 360 bp, Gossypium hirsutum
  Clone ID: LIB3493-023-P1-M1-G7
ggctatcgcactgtgaatccaccaccaagaaggtccggatcctcagcattgacggtggtggaacctccggcattgtctctggtgccgctcttatacactttgaagaccagatccgcttcaaaatgggtgatcctcatgctcaaattgccgatttctttgacatgatagtcggcactggcgtcggtgctcttattgctgccatgctctctgtcgacgatggaattgggcatgcaattttctctgctagagaagctgtcaagttcatcactcagaataactctaagctcttcaaagtgaatagacttgccagagtactataccgtcggaaaagattctccggtgagagcatggataatgtgc

SEQ ID NO: 4039 - DNA, 435 bp, Gossypium hirsutum
  Clone ID: LIB3493-023-P1-M1-G8
gaaaagaaaagaaaatggaagtcggtgaatgcattgcaacagaagcacccaaggcaccagtgactaaggaaagaaagatcggaacagacttggaaaaatatatagcaaagccatatgtggcaagagcactgcaagctccagatgtgggaaatcctgatgggacaaaaggatatccagataatggaatgactgttcttcaacaacatgttgccttcttcgatcaaaacaacgatggagttgtttatccttgggagactttcaaaggtattcgagatcttgggttcgatccattttcctcatttgtcataacttttgtaattaatgcagcatttagttatcgcactctcccggggtgggtgccaaatccgttacttcccatatacatagagagaatacacagagataagcctgggagtgattcagcaacatattgat

SEQ ID NO: 4040 - DNA, 120 bp, Gossypium hirsutum; identical to SEQ ID NO: 4030
  Clone ID: LIB3493-023-P1-M1-G9

SEQ ID NO: 4041 - DNA, 511 bp, Gossypium hirsutum
  unsure (1)..(511): unsure at all n locations; Clone ID: LIB3493-023-P1-M1-H1
gggccattggctcatctgcatgagatgcagcctgaggcacagttagatccaacaaaaaagttgtcaagaatgatagctgagaagaaatatgatgaagcattcacctctgccttgcatagaagtgatgtctcaatagtttcctgtttgtgttctcaggttgatctacaagggatattgtcaatgaaaccatgttcactgagccaaggattattgctggcactttttcagcaactggcttgtgatatcaacaaggaaacaagtagaaagctggcatggatgactgatgtagcagttgccataatcccatcagatccaacaattgcagtgcatgtggtaccaatctttaggcaggtgtctcagatagtggatcatctacaaagcatgtncactacatctgcctcagaatccgccagcattcaggttcttaagtttgtcataaacagtgtgttaagcgggaaaggatttgttcaaaattgctagaatatctnccttttttttttctttttggttt

SEQ ID NO: 4042 - DNA, 365 bp, Gossypium hirsutum
  Clone ID: LIB3493-023-P1-M1-H10
aagacctgaaaacatgtcgttcgacgccagcgtccacggtggcggcggcgacgctaacaccgacggcgcgaccaataagcctttcttttgctaccaatgtaaccgtaccgtcaccgtaacaatctacccttccgctgacccttcttgtcctctatgcaacgaagggttcctcgaagaatacgaaaaccctagctttgaaaacccgaattcgaactcaaacccgttatccgaaccctttttgtcggtatcggatccgttctcttccttggctcccgctccttttccttcctcttcttcaacgacgagttctttaccgtctcctgcttcaattgaccttcataaccctaactcattcgggtcgaccc

SEQ ID NO: 4043 - DNA, 244 bp, Gossypium hirsutum
  Clone ID: LIB3493-023-P1-M1-H11
cttccggggccccgtgggtggaaatttctttctcggatttcccgtggagccaggaaagatgcaaaccttcgttagaaccttaaccggcaagacgatcactctcgagggcgagagctccgccacgatcgacacctggaggaccaaaattcaagataaggaaggcattcctccagaccagcagggtttgatcttcgccggaaaacagcttgaggacggccggaccttggcgcgttacaacatccaa

SEQ ID NO: 4044 - DNA, 288 bp, Gossypium hirsutum
  Clone ID: LIB3493-023-P1-M1-H2
cccacgcgtccgcggacgcgtgggttggttttgaaggtggtcctgaaaaatgttgttcttctggatgttccggtaattgtaatcctggtggtttcgttctaccatttcctcaaattccagaaatcccaagaattccacagatcccacagatcccacaaatcccacaaattccactaatcccacagatcccacaagtcccacaaatcccactaatgccaggacagtcgggatgtgagagtggggagtgttaccgtcagggttgcggtgggacttgtgctgagtgtggtc

SEQ ID NO: 4045 - DNA, 477 bp, Gossypium hirsutum
  Clone ID: LIB3493-023-P1-M1-H3
cggacgcgtgggctgtctcaagatttccttgatctccatcctttctggtaattcttggagcttgcattctcctgttagtgtactccaactaatggtgtagtggcttttttccattgtcaacgggtgtgggcgtttttgcggtgtagagctcgtttttaagcagtttggactttggaggatcggagatcgtggtcgatgatatcgagaaagaacatgggaagtgcttcgccgctccttctcattacattagttcttggtgtttgctttgccacatataatcttgtaacaatggtaatgcacaatagatctatttcaaaactgacaatctataactccgatggtggaatatttgttgatcccatcattgagatgcccgaaagtgtgaggaaattgaagcgtgccaaaatgcctttccatgttgccttaactgccactgatgctccctacagcaaatggcagtggcgtatcatgtactat

SEQ ID NO: 4046 - DNA, 193 bp, Gossypium hirsutum
  unsure (1)..(193): unsure at all n locations; Clone ID: LIB3493-023-P1-M1-H4
tcgctgacgcgtgggctgtctcaagatttccttganctccatcctttctggtaatggggggagcttgcattctcctgttagtgtactccaactaatggtgtagtggcttttttccattgtcaacgggagtgggctattatgctcagtacttctcgtttttaagcagttaggactttggaggatcggtgatcgt

SEQ ID NO: 4047 - DNA, 97 bp, Gossypium hirsutum
  unsure (1)..(97): unsure at all n locations; Clone ID: LIB3493-023-P1-M1-H6
cgggacgcagcggctgacggcaacgttagggagtccggagacgtcggcggnggcctcgggaagagttatcttttctgtttaacggcctgcccaccct

SEQ ID NO: 4048 - DNA, 416 bp, Gossypium hirsutum
  Clone ID: LIB3493-023-P1-M1-H8
attgtggagtagatgcccatgcaattgatagggtgcttctttgatcttccaagccttctctatacgcaaatatcaactgcaatgcgctatctaccgctgtcatttgtagacagacctctattgttagatcacttttctaggctggcatcaagatggacttaaaggtgagagttggatcctggtcttgatgctgcgaagtggatattcatgtagtggcaaactcaacttgcagagccacaagctcacttgaagctgggagctcatctaaagctgcgagctcacccaaagacgcgagctcaactcaagttgcgagcacgttaaagtgtgaggtggtaaggtttttggtgaaccccgagttaaaatgcaagcaggggtcacatatgccgatgtcgatgttttggttaagctggttggtt

SEQ ID NO: 4049 - DNA, 294 bp, Gossypium hirsutum
  Clone ID: LIB3493-003-P1-M1-A1
taaagttccagcaatccaaaccaagcaaaagttgagtaaataacttgtgcttcaggcttgggctgttattttggcattgaaatcagatgccccctgtgatggagatggttcatttttgcatgggttcttttgaaggactttggatgaggggactagtgcaggaaaagggatgtcgttgtaagatatcggaccattatatgttctagcggcactcatttaaatattatgtttcctttgttgttatcgtattcatttgatcataattgaagggaggtggtgggtaatctaactata

SEQ ID NO: 4050 - DNA, 487 bp, Gossypium hirsutum
  Clone ID: LIB3493-003-P1-M1-A10
cggacgcgtgggattggaaaagccctaatttgacagctctctcagtctctcattttgcctgaaaaccatgtcgaggagaaaggttagggagcccaaggaggagaatactacccttgggccggctgtacgagacggcgaacatgttttcggggtggctcacatttttgcttcatttaatgacacatttattcatgtaacagatttgtctggaagggaaacaatggttcgcattacgggtggtatgaaggtgaaagctgatagggatgagtcttccccttatgccgccatgcttgcagcacaagatgtttctcaacgctgcaaggagttgggtattacagcccttcatataaagcttcgagctactggagggaacaaaaccaagacacctggtcctggtgcccagtcagcacttagagccctcgctcgttctggcatgaaaattggacgcatagaggatgtcacccccattcccaccgatagtactcgt

SEQ ID NO: 4051 - DNA, 527 bp, Gossypium hirsutum
  unsure (1)..(527): unsure at all n locations; Clone ID: LIB3493-003-P1-M1-A11
gttttcagtactctaagagtcttgatgaggcatttccaaatgtcacttgtcattttgaaaattcagttactctgaaggtttatccacatgagtacctattcccctataatagattgtggtgcattggatgggccaacactggaatgcaatgcagggatcgaaagaatatgacccttttgggagatttagtgctttccaacaagctggttttgtatgatttggaaaatcagaccattggatggactgagtacaattgttcttcaagcatacaagtgctggacgaaaggactggaactgtgcatttagtaggttcccaaaacatttcttctgcttgccatttgaatgcctggtctattacggttttgatcttgttagctacgttactgcactttntgggctgctagtaaatctttagacaatacgaaaaaaagctaactatcagtttaaagataaaagaaatcaaatattaaatagaaatcaagacattcatcttgatattagtgctgaaatgatagaatagaatagat

SEQ ID NO: 4052 - DNA, 388 bp, Gossypium hirsutum
  Clone ID: LIB3493-003-P1-M1-A12
ggaggagccgattaaatttgtaaaaggggggattcccgaatgaataaaaaaaaaaagagaaaagaatacagatattaagaaaggaaattgaatagcagttttggaaaagaagtgattttctgattgttttttcttttctttggtttttttttccttttttgcaaaacaaaaagagcaaaaggggatacttacctgcgcggaggcgacgacggagccctatttgctccgtccaggtcggagctagatggggcttcgaattgtttgaggcgggagacaagagaatgggccatggggctgctgttgtttcagaagaaaagggaaatggcttagggttttctgatttagggtttaaaatagcatttataggtgctcgaaacggcaccgttta

SEQ ID NO: 4053 - DNA, 208 bp, Gossypium hirsutum
  Clone ID: LIB3493-003-P1-M1-A2
aaattcgggttgtagaagtcaagtattgagccaacatacaaaaccatgaccctgcttcagcaaatttttgtgataatcctgcctacaaggccagacgctgaactgaaagatttacttgtgtacgctgcattaaagaggatcttgactctcgaaccatatccaccataacgcgtaacagaatagtagacattggtcgttgtcgcacctt

SEQ ID NO: 4054 - DNA, 78 bp, Gossypium hirsutum
  Clone ID: LIB3493-003-P1-M1-A3
aaaaacatcatccctttcgtaataatgaagacagtcttcactattttctcggtacttgtattcaccgtaatctccccc

SEQ ID NO: 4055 - DNA, 471 bp, Gossypium hirsutum
  Clone ID: LIB3493-003-P1-M1-A4
attccattgttccattaaactattttttcaatcattatactctccaaaggagacaatttttaggctgtggtgacggcgaagaaggcggtgttttatctaaagtttacgaggaaaggatcgtcatggggtattcgccagaacaattatttgatgtggtcacagctgttgatttgtatcacggatttgttccttggtgtcagcggtctgacgtaattaaacactatccagatggatcgtttgatgctgaattagagattggttttaagtttctggttgagagttatgtttctcatgtagaattaagcaggccaaagtttgtgaagtcaactgcatcacaaagtagccttttcgatcatttgataaacatttgggaattcaatcctggaccagtcccaggaagttgcagcctttactttcttgtggactttaagttccagtcaccactctatcggcaggtggcattcatgtttt

SEQ ID NO: 4056 - DNA, 394 bp, Gossypium hirsutum
  unsure (1)..(394): unsure at all n locations; Clone ID: LIB3493-003-P1-M1-A6
caaaaggcgactgaaaatggagcatccatatgtgcccagggatctgcaactgcctggatatgttcccgtctccctttctcagtccaccattcttaccgtctatggtctctcttccctgctcgtcgtctcccttgtttggttcctctctgggcgatcgcgcagcatatctaaacttgatagattgttgatgtgctggtgggctttcacgggacttacacacataattcttgaaggatattttgcattctcccctgaattctataaagacaagactggattttatctggctgaagtttggaaggaatatagcaaaggtgattcaagatatgcacgaagagactcagcaattgttgctgntgaaggaatgacatcagttcttgaaggtccaccttgc

SEQ ID NO: 4057 - DNA, 192 bp, Gossypium hirsutum
  Clone ID: LIB3493-003-P1-M1-A7
cgtatgtctcttcatctgtctgaaccaaaaagtctttagcttttcgcttcgagagagaccatgttggtttaccaggatctcatctccggtgacgagcttctttctgactcattcccctacaaggaaatcgagaatgggatgctgtgggaagtcgacggaaagtgggttgccaaggagctgtctatgtaacat

SEQ ID NO: 4058 - DNA, 261 bp, Gossypium hirsutum
  Clone ID: LIB3493-003-P1-M1-A9
ccttactactgccaagttggtggtgagaagctgtagttactactattcttcttccactgcatcggctgcggctgttgaagctgagagaactatccgggaaggccctaggaacgactggactcaccaacagatcgactccatctaccattctccccttcttgatctccttttccatggagctcaagttcacagatatgctcataacttcagagaggtgcagcagtgtactctcctctcaatcaagactggtggatgtagtga

SEQ ID NO: 4059 - DNA, 338 bp, Gossypium hirsutum
  Clone ID: LIB3493-003-P1-M1-B1
ggactaccccgaatatgtcataccaagcatggcgtcatgagcctgagaatgcccctgcaatttatcgtagtagaactgtctttgaggatgcaactccagagttggtcagagatttcttctgggatgatgagtttcgaccaaagtgggacactatgctttcatatgttaaagttttggaggagtgccctcgtacagggacaatgattgttcactggataaaaagttcccttttttgcaggacggagtacataatgtcaaaatatgaggtggaagctaccatggtacaaagaggctatctgattgaaactgacagcagatgtgacttatttcagtggtat

SEQ ID NO: 4060 - DNA, 474 bp, Gossypium hirsutum
  Clone ID: LIB3493-003-P1-M1-B10
cccaactccacaacgccaaattcaagtttaccaaccttattgtttatttgttcgagaattagagagtttttttgaatacccatggcttcgaagcggattaataaggagttgaaagatctgcagaaggaccctcctgcatcttgcagtgctggccctgttggtgatgatatgttccactggcaagcaacaattatgggcccagcagacagtccttttgctggaggactatttcttgtttccattcacttccccccagactatccattcaagcctcccaaggtttctttccgaacaaaggttttccatcccaacatcaacagcaatggaagcatctgtcttgacattctcaaggagcagtggagccctgcccttaccatatccaaggtgctgctttcaatatgctcacttctcacagatccaaatcctgatgaccctctggtgcctgagattgctcacatgtataagactgataga

SEQ ID NO: 4061 - DNA, 324 bp, Gossypium hirsutum
  Clone ID: LIB3493-003-P1-M1-B11
gcaggggttaaaagctggtacaaaaaagcaaaagtatgataagattagtgaaaagaaggtatcgactcctatagaggttctttgtaagtcatatccgtctgagtttgtgtcttattttcattactgccgatctttgcggtttgaagataaacctgattattcatatttgaagaggcttttccgagacttgtttataagagaaggttatcagtttgactatgtctttgactggactgtattggagtacccaaagattgggggcagctccagagggcggcattccagtggaagggcaggtttagctgctggaccaaccattgaaaa

SEQ ID NO: 4062 - DNA, 130 bp, Gossypium hirsutum
  Clone ID: LIB3493-003-P1-M1-B12
ctctctcttcaggataaatgcctattgcagcattcatggtgagccctggagattagatgtcatcttttctcaaagcatcacacttgctagctcatctaatgtattgagctactttggtctctctgtattc

SEQ ID NO: 4063 - DNA, 365 bp, Gossypium hirsutum
  Clone ID: LIB3493-003-P1-M1-B2
caaagaattttatctatattgaaaatcagtatttcctcggaagctcatttgactggagtcctgatgacattaagcctgaggatattaatgctttgcatctgattcccaaagaactttcacttaaaattgttagcaagattgaagcaggagagaggtttaccggttatgttgacgtccctatgcggccagaaggaattccagagagtgcctcatttcaagcgatattagattggcagagaaggacgatggacatgatgtataaggatgttgttcaggctctcagagccaagggtagcgatgagaatcccagaaactatttatacattttctgccttgggaaccgagaggttaagaagagtggagaa

SEQ ID NO: 4064 - DNA, 450 bp, Gossypium hirsutum
  Clone ID: LIB3493-003-P1-M1-B4
cggacgcgtgggtaaaaacccctccgctttgtccacataaaacccctttctcctctctcaataaaactctgttgatcaacggtatccgccgtccaccaccggccacggccaccagctaaattaaagactcggggggcaggaataaggccatatacctgttgttaatactgaggtatgtgtggcattgactttaacaatctgacactctgtgatggattctagatttaaaggtattgactgggtggggggcatttaccagaagtttgaaacgctgtgccatgagatggataatatcgtgaatcaggacactgtcaaatatgttgagaatcaggcacaaagtgtgggtaaaagcatgaagcgattttattctgatgttatgcttactctaaaacatgatgccaaaggagtggctttaaaaagaagcactacaattggtacctcttttgaatc

SEQ ID NO: 4065 - DNA, 153 bp, Gossypium hirsutum
  unsure (1)..(153): unsure at all n locations; Clone ID: LIB3493-003-P1-M1-B5
cccacgcgtncgtgaagctgatgtcctctacattcttggtggctctttgtcaagctattgatttgaggcatgtagacaggaatntgaggaacacggtgaaaaacaccgtgagccagatagctaagaagacgctcactacaggtgccaatggtg

SEQ ID NO: 4066 - DNA, 466 bp, Gossypium hirsutum
  Clone ID: LIB3493-003-P1-M1-B6
acaaaaccgaacacccaattgctagggtttcggcgccgcagctctgtggcttttccagtcccctttgcccttttggttgacttgcaggctaccacgggaccacgcgcgccttcatcatccgtcgtagctctgaccggatccccaaagatccgtttggccttggacggagaggcaactgtcgattaagtcggcgtcgatcgacaggtaagagatcctcccccttctttatactcgtatcacagattaagaaaaataaattggagatgaataaaaaagaaaaacgatgaatgaacaaccttgaaatctttgctttctctatttgattgcttgatattcgatagttttttggtgcgtatctctgtgtttaatgtgcgttcgtaaatgtgcgtaaccaaatacaatcgatccattcctggctttatagcccgaacttaaatggaaaattcaaaattaaaattcaatcttt

SEQ ID NO: 4067 - DNA, 505 bp, Gossypium hirsutum
  unsure (1)..(505): unsure at all n locations; Clone ID: LIB3493-003-P1-M1-B8
ctttataccccactttaagttactcaaaatttccgtacttttcctttttgcatggcagtaagtctattgtcacatgagttgtctgacctgtgtcttgngaagccagcactaaggtcactttccatcacatccaccattgctgaagctcttgaggtcttgaaaacctctgatgacaactttgttagtatctggaattgtgatgatgatgagtgctgtagtagatgtgtaggcaaagtttgcattgtggatgtgatttgctatctttgcaaagatgaaaatttcgtatcaccttcaattgctttgaaacaaccagtttctgtacttttacctaagatccctggtcttattatccatgtggaaccatctngcagctngntagaagcaattgatcttatacttgaaggagctcanaaccttgtggtaccaatcaaaaccagtngtgtcaacaacangagatcaatacagcaacaaaagccattttgttgttaacacaagaagatatatc

SEQ ID NO: 4068 - DNA, 394 bp, Gossypium hirsutum
  Clone ID: LIB3493-003-P1-M1-B9
gccgatccttttggtgcacccacacagtattggccatgggaagatggtaccaattccattgctatggccaaaagaagaatgagagccaacttcgaattcctaagcaagcttggagttgataggtggtgtttccatgacagggacattgctcctgatggcaaaacactaaaggaaactaattcaaacttggatgaagttgtggcaccttgctaaagaacttcagggggacaagatccgtccactgtggggtactgctcaactatttatgcatcctcgttacatgcatggtgctgctacaagctctgagttgggtgttaatgcctatgctgctgctcaagttaagaaagctatggaggtgacacattatttcgggggggaaaatattgttttttgg

SEQ ID NO: 4069 - DNA, 443 bp, Gossypium hirsutum
  unsure (1)..(443): unsure at all n locations; Clone ID: LIB3493-003-P1-M1-C1
gaaacttgaggggacgaatcttgctctaccttgcttttctctcgcaaaaaattctcaaacttgtttttaacgttagctgaatactatcgctcatttcttcccgcagaaccctaatcgataactgaagccatttaatcatgtttgggcgtgttccaaaaaaatctgataacaccaagttttatgaagtacttggggttcccaaaagtgcaagtcaggatgaattaaagaaggcttataagaaagctgcaattaagaatcatccagataaaggtggagaccccgagaagtttaaggaactggctcatgcttatgaagttcttagtgacccagagaagagagacatatatgatcaatatggtgaagatgctcttaaagagggaatgggagggaggcggtcttctcacacccanttgacatnattgagtcattttttggtggggagc

SEQ ID NO: 4070 - DNA, 407 bp, Gossypium hirsutum
  unsure (1)..(407): unsure at all n locations; Clone ID: LIB3493-003-P1-M1-C10
cggacgcgtgggcggacgcgtgggcttacttttatattgccaagctctgttggggtttccccgcttgttcttctattaatggcgttctatattgaggatggcttgtactaagagaactctggctntccttttgatgctggctcttgtaggagtctcccttggtgcagttcacaaagtgggcgattccaccggctggactagtcttgggaatattgactacctcaagtgggcttccaccaagaatttccatgttggcgactctcttctttttcagtacaaccctcaattccacaacgtgatgcaagtgacccacgacgatntccagtcatgcaacggaacatctgccatcgccttctacacctntggatccgactccgaaccctcataggcctggccactttatttct

SEQ ID NO: 4071 - DNA, 385 bp, Gossypium hirsutum
  unsure (1)..(385): unsure at all n locations; Clone ID: LIB3493-003-P1-M1-C11
gttntgcttttcatactcatttagcccctttcattagcatcaaaatcactccagttttctttatcactgaaaaatgtcttgctgtggtggaaactgtggctgcggtactggctgcaagtgtggcagtggctgtggaggatgcaagatgtatccagacctgaacgctgccgagatgaccacaactgagactctggttcttggtgtagcaccccagaaagcacactttgagggagctgagatggaattcggggctgagaacggctgcaagtgtggagacaactgcacctgcaacccttgcaattgtaaatgattagagaccaaagccaaagctccctggaagcagaggcgcctttgtctttaagaaataatatggtttggtggttat

SEQ ID NO: 4072 - DNA, 477 bp, Gossypium hirsutum
  unsure (1)..(477): unsure at all n locations; Clone ID: LIB3493-003-P1-M1-C12
agatgcaaagtttttttcttgcagagacgctgaaatatctttatcttgttttctcaccacctaccgtcatcccattggatgagtgggtattcaacacagaagcgcaccctttacgaatcgttaaccgcaatgatgcaaatcttgcagcattggaagggcaacataaacctgtgatcaaaatacgaagcaggaaaactggtcgattgggtggtaattaggatttgtttccagtttattgttccttgctgaactatgagattttaatcctcaaatagacgacaagccttactntataatgatatcatttcttgaaatggatagaagagtgactctctagtttctaacagagaagcgtgcagctcgaccaaatccttcattccaggttagtgtaaactggtgtatcattatattcacgtggattgaaatggcctgtatgctatcaatttacctttttaaaatggatatttagcataaagc

SEQ ID NO: 4073 - DNA, 381 bp, Gossypium hirsutum
  unsure (1)..(381): unsure at all n locations; Clone ID: LIB3493-003-P1-M1-C2
cggacgcgtgggcggacgcgtgggctggtgatggtgaggttgtaaggaagagagacttctcccacactgttgatttgaagcttaaccttatttccacctctccaactgatgacaaggacaaaaatattgtcccttctcaccttgatcctgctaagcctccacctgccaaggctcaagttgtgggatggccaccggtccggtcattccgaaagaacatgttagccacccaaaagagcagcgccagcgaggacagtggtgagaaggccgcctttgtgaaggttagcatggacggcgcaccctatctccggaaagtggacctgaggatgtacaaaacttnaccaacaactctcgatgctctagctaaaatagtcagtcttcact

SEQ ID NO: 4074 - DNA, 349 bp, Gossypium hirsutum
  Clone ID: LIB3493-003-P1-M1-C3
gtggatcatatctcgttcgacatactcggactacaattgatgaagggaagttgcaagacaaagacatcgatagagctcttctgaaccttttctcggtccaactccgtcttgggctgtttgatggagaccccacaaaggggcagtttggagagttgggacctcaaaacatttgtaccatagagcacaagatgctggcacttgaagcagcaaggcagggaattgttcttctgaagaatgagaagaagttcctgcctctggatagaaatgttgtttcttccatagctatcattggtccaatggctaacaacataagtaatatgggtggtggctacactggttttccatgtga

SEQ ID NO: 4075 - DNA, 358 bp, Gossypium hirsutum
  Clone ID: LIB3493-003-P1-M1-C4
gttgttttctaggaagtaggagcgtccctcagcctggcctagaaaaggcacctcgtcttcactacctgctgtataatatagattggtgggcatggaaacaacttcaattccattgataaaagcaaaagaatcagagatatcaggacttggggtgaaggttaactttagcctttgacttccatcaacgtttacacaaaattctttgatcagagtaacttggccttgcgcatggagtaaagcactgaaattcttgagaagggtatagggacctgctttgacagagaagaaagctttattattataagggtcgtcaaagcctggatatgttgttgggtagaagtagaggcgaatgaacttt

SEQ ID NO: 4076 - DNA, 396 bp, Gossypium hirsutum
  Clone ID: LIB3493-003-P1-M1-C5
ggcaagatggctgtaaaaagaacagcattgcttgccctcttctttgggctcaacgttcttttcttttctctagtcagagcttgcggttcttgtccttcccccaacccaaaaccaaagcctactccttccccatcccccttaggcaaatgccctcaagatacccttaagttaggtgtctgtgctgaggtgctcggtttagtcaatgtaactggtggttcgccctcagtgcaaccatgctgctcccttctccaaggccttgctgatcttgaagctgtttgttgcctttgcacagcactcaaagctaacgttttgggcatcaaccttaatattccagtttacctcagcttgcttcttaacgtctgctcaaagaaagtccatctggcttcaatgtcccta

SEQ ID NO: 4077 - DNA, 173 bp, Gossypium hirsutum
  Clone ID: LIB3493-003-P1-M1-C6
aaaatatcacaaatcttcttgttcttctcagaaatcttaatattatgactatgggctgaaatcccaagggcttttttgacatgacgatcgggggtgaacccgcttgtcggattgggatggagcttttcgcagattggacttctcgcactggggaggaatttccgtgccttttg

SEQ ID NO: 4078 - DNA, 439 bp, Gossypium hirsutum
  Clone ID: LIB3493-003-P1-M1-C7
cggaagctcatttgactggagtcctgatgacattaagcctgaggatattaatgctttgcatctgattcccaaagaactttcacttaaaattgttagcaagattgaagcaggagagaggtttaccgtttatgttgttgtccctatgtggccagaaggaatcccagagagtgcctcagttcaggcaatattagattggcagagaaggacgatggacatgatgtataaggatgttgttcaggctctcagagccaagggtagcgatgagaatcccagaaactatttaacatttttctgccttgggaaccgagaggttaagaagagtggagaatatgaaccttctgaaagacccgaccctgatacagattatgccagagctcaggaggcccgtcggttcatgatctatgttcatgctaaaatgatgatttgtgatgatgaatac

SEQ ID NO: 4079 - DNA, 432 bp, Gossypium hirsutum
  unsure (1)..(432): unsure at all n locations; Clone ID: LIB3493-003-P1-M1-C8
atctgtggtggtggagatcatatctcacatccggctcctcggctgtgtacctcttcctctacgctacattctatttcttcacaaagcttgagatcactaagctggtttcggggctcctatactttgggtacatgctaatcgcttcgtatgcattttttgtgctaacgggcaccatcggattttatgcgtgcttttggttcacaagacttatctactcatctgtcaagattgattagtgtgtaaaaccgggatctgctttgtgttcttttgtcatattcatggaccaatgtcttaggttaagatatactcattgctttaagatgtatacttaaattctcatttttgaaccgagttgttatttttatagctgatttgagaaaaatacttaattcttgattttgttgagagaggggcttcttgtgaantaataga

SEQ ID NO: 4080 - DNA, 413 bp, Gossypium hirsutum
  Clone ID: LIB3493-003-P1-M1-C9
gaggtcccatattgcattgttaagggaaaatcacgtttgggatcgattgtccacaagaaaactgcttccgtcttgtgtttgaccacggttaagaatgaggataagctggaattcagcaaagtactcgaggcaatcaaggcaaacttcaatgacaagtacgacgagtataggaagaagtggggtggcggcatcatgggctccaagtcacaagcccgaaccaaagcgaaggagaagcttcttgcaaaggaagctgcacagaggatgacatagaggaattaatacaccttttgttgcagttcgtgttgttgattaaatagtcttttgtagtaaggtacgatcgattttcgactcgggtttactcttttttccggaggaacattcatatacttttgtggttgaactttctaaatgac

SEQ ID NO: 4081 - DNA, 318 bp, Gossypium hirsutum
  Clone ID: LIB3493-003-P1-M1-D1
tccatgaggaaaagtgtgagtatgaacaacctttctcaatacgaacaagctcatgagtcgaacaagcataacaacaagagcaacaaagataaggcgatgatacctaccgtggttaccctcgcgacatgccgtctactcttggaatgaagccaaaaggtgcgggcggggggaccagtgtttgtgacgaaagaggaagaatggaggtttaaactggaatgactcccaggagctgtaaaatttcacacattacgcgggaatagtttgtacactcggcgatcatgaaacatgtcaaatatacttacatgtcttcggttctgt

SEQ ID NO: 4082 - DNA, 465 bp, Gossypium hirsutum
  Clone ID: LIB3493-003-P1-M1-D10
gttcacgaaggatgcatatatcagttgaaactgttctgtggcaaggattatccagataatccacctagtgtgaggtttcaaacccggataaacatgacctgtgtcaatcaggaaactggagtggttgagcctagccttttccccatgctcgctaattggcagagggagtatacaatggaggatatattgactcagttgaagaaagaaatgatgtctccacaaaacaggaagcttgctcagcctcctgaaggcaatgaggaggcagggctcgatcaaaagggcttaccactgaagtgttgcatcttttgaagtccaccagagttatatatgaacataatgtatataaaaaaaatatagtaattccggcaaccggcttagcaccaaattccaatggtggccaaataaatcgaaacttaaccgatgacattcaaaaactttatgagttatgctaaaatcgaatcttaa

SEQ ID NO: 4083 - DNA, 456 bp, Gossypium hirsutum
  unsure (1)..(456): unsure at all n locations; Clone ID: LIB3493-003-P1-M1-D11
aaaatctttccagtttctattttctcacaacaaaactgaaaatgtcttcttgctgcggaggaaactgtggctgcggcgctagttgcaagtgtggcaatggctgtaacggatgcggtatgttccctgacataatagagaagactacaactgagactattgttcttggtgtggcaactcagaaaatacactttgagggatctgagatgggagttggggttgagggtggatgcccgtgtggagacaactgcaaatgcaacccttgcacttgcgggaaaaattgaacaacaaagagaagcagagtggcctttgtcattttaactaaataaattctattactttagtatgtatcagcaaatcttcatgaggatntggttcttaattatgtgtaatgtggctcttctgctttgtcagaatgtattatgatatttaaagaaagttgtcttctatcgaaagaat

SEQ ID NO: 4084 - DNA, 137 bp, Gossypium hirsutum
  unsure (1)..(137): unsure at all n locations; Clone ID: LIB3493-003-P1-M1-D12
gttggagtcaaagatctcatgtttcgatgaaagagatggtgtatgtgaacaactcatggngattcctatgcctctatcatacactcggttgacatcaaggtntttggtgctatggcatctcactcttcctatcatac

SEQ ID NO: 4085 - DNA, 137 bp, Gossypium hirsutum
  Clone ID: LIB3493-003-P1-M1-D2
ctctgtggtttccttctctgtagcatgcttcttctatagtctctactcaccccccatggctatgcttatgctatttgcttattagagcttctcaaatatgaatatctctcacttacaataaccctctcatccaatca

SEQ ID NO: 4086 - DNA, 381 bp, Gossypium hirsutum
  Clone ID: LIB3493-003-P1-M1-D4
cgaaatactcactccaacatgaagcttatgctgatttgcaaataaaaaaatgataggattacagctgcccttgagccaaacgcaaagaataagacttcaaagagcattggaaaagcttcagtctctttcttgtaaagcgaattccgacgcttccgttaccgtcgccgataccattcccgtcaactatgaagacgcttttctcaaagggcatgggacaacggacctaaatggcgatttggtggcaactgtgtgtggcgtggtggagcgcatcaacaaactggtctatgtacgcgccttacgtgctaggtacaagccagaggttggggatatcgtaatgggacgtgtagttgaggtttctcaaaagcgatggagattggagat

SEQ ID NO: 4087 - DNA, 235 bp, Gossypium hirsutum
  Clone ID: LIB3493-003-P1-M1-D5
ctcccctcttagctcacagctctctcgagttctgtaatgggtaaggagaaggttcacatcaacattgtggtcatcggcatgtcgactctgggaagtctacaaccactggtatttgattaaagctggggattgcagcgtgtgatgaagttgaaagagtgtgataaaaagattattctgggtgcagtagcacggcgttacatttgttgagtaatcaactctatgatggctgagatta

SEQ ID NO: 4088 - DNA, 436 bp, Gossypium hirsutum
  Clone ID: LIB3493-003-P1-M1-D6
gtcaaacctcaactcttaaaattaattttgtttttctttttaccgtcgccaccattgaaatccttcttcttcgtcttgttcttcctcttctcctccttattcgcttcttctttgtctttgcccaacgccctttcatttgttctctcttccttcaaactctgtttttacttttaatgtacaaattatgaaattagtattaccactatctgcaaacactaattcagtttagtttcttacaacaccaaggccaatgtttcaaatgatcaaacatcacccatatttccaccatattaaaagctcggtctttggctttatgtttttgttacccacttcacttattgctctttgccttcttcttttagcttggaatggcttctctgttttctatatgtatctccctggttatatcaaatctttaccgggacccatcaaattg

SEQ ID NO: 4089 - DNA, 184 bp, Gossypium hirsutum
  Clone ID: LIB3493-003-P1-M1-D7
ctccaaagggacatggaactcgcctggcacaggcacaccgaatccgctgtgagtttcacaaaggtgctgctgaccatacatatatgaggatcgatggggagccgtggaagcaaccactgccaaaagatgatgacgcagttgtagttgaaatttcccaccttggacaagtcaacatgctcgcaac

SEQ ID NO: 4090 - DNA, 136 bp, Gossypium hirsutum
  Clone ID: LIB3493-003-P1-M1-D8
gccgcgtacttgttcgtccattgatttatacaaggaagctcctgctgccatggcccgggacatgatcatgggtcaccaccaatggggtaccggatcattcgcacacatctactttcacacagagaatgattgcaag

SEQ ID NO: 4091 - DNA, 446 bp, Gossypium hirsutum
  Clone ID: LIB3493-003-P1-M1-E1
ggtgtccatgatgtattcaatgttgttggcgctggttcagcaactgctgcagcctttggtctaattatgcctgggtctcttcaatggcgtgcaaggaatgtggtgctaggttcggttcttggagcagctatatgttttcctcttggatggatccacttgaagcttgtagagaaagcaaatgaagggaatatggctgctaaaagttcaggtgaaattggagaagcaaagagtggtcttggggctgccattgatcggcttgaagaaaacttgaataagtagacccaccaatttttgcatagatagagaacactactgacagcattggcatggaactaaatttactgcttttggcaatgtattcattgtttttaagggctaaagttttgcatgggataaagggctgaggagattggaagtatggaactgttatttggtaatcttattct

SEQ ID NO: 4092 - DNA, 523 bp, Gossypium hirsutum
  Clone ID: LIB3493-003-P1-M1-E11
caaaaaagttatctcatcttgagcaaagttacagtcgtcctcatcgaacaactatggcagccatcaaagtccacggaagccctctgtccactgctacacaaagggttcttgcatgcctttacgagaaaggtactgattttcagtttgttcccataaacatggctgctggtgaacataaatccgaaaactacctttccctcaatccattcggtcaagttccagcttttgaagacggtgacttgaagctcttcgagtcaagagcagtcacccattacattgctcatgaatacagcgacaaggggacccaactcttaattcctggctctaacaaggatatggctgtcttacaattatggaaggaagtggaagcccaccagttcgattcttcatgttcaaaaatagcctgggaggcgttttacaagccattaatgggcatggttaccgactccgcggtcgtggaagaaaatgaagggtagcttgccaaagttcttgacgtgtacgatgctcgattgacacggtcaaa

SEQ ID NO: 4093 - DNA, 444 bp, Gossypium hirsutum
  Clone ID: LIB3493-003-P1-M1-E12
cccaagttcccagcccatttgccaccaaagactgtgattgagaggccaaacacctaaagtggttaagcaagacaagaagaagaagccccgtggccgcgcttacaagaggatacaatagaaccgtcgtttcgtcatcgcagtggttggttccggcaaaaagaagggacctaactcatctgagaagtaagagctatgcaattgaaaaaggttattgtttgaagcttttatggatttagtctgtgtttttcccttttttttttttgtaatgttttatgatacttatttttatccactggtattaaggatcaagtaatttgaagttttgttggcaaaatattatgtgattttgatattagttaagcttaattcttggttctttacgtatttcttttctgcttcatcgctgccgaattattgccatttcaaatgcttaaagtttttatt

SEQ ID NO: 4094 - DNA, 381 bp, Gossypium hirsutum
  unsure (1)..(381): unsure at all n locations; Clone ID: LIB3493-003-P1-M1-E2
ctaaatttaataattaagaaaataaagattgagatataggaatgagaaaggtggagattgcaataatatgtctcttttcattggttttcgtagccatgcctgttaaactgccacaaaggccacagctgatggcaccaccccgtccactttgtgcttcacaattttccctggtcaactatgcgtgtgcggcgctgccattaacccctntctcaccaccacctcctcgcaatcgcaaccatagccgcagccgcagccgcagccgcagccgcagtaacagccgccgtcgcagtcgcaagcataggcgcaggcacgggcaccgtgagacggaaatgcatagctactgttgtcaatggctgaagcaggtggacactgagtgtgtgt

SEQ ID NO: 4095 - DNA, 143 bp, Gossypium hirsutum
  unsure (1)..(143): unsure at all n locations; Clone ID: LIB3493-003-P1-M1-E3
caaaaacagatattcactcacacagccgggtcgaaaagttgtgcatgtgtagctgaagcggatgaactgtcgtccggtcaaaaagttggacgccttcaactngttgaagttacacataggaagaaagatggatctcctatgac

SEQ ID NO: 4096 - DNA, 419 bp, Gossypium hirsutum
  unsure (1)..(419): unsure at all n locations; Clone ID: LIB3493-003-P1-M1-E4
gagaaatcgttaccggaggtcttgattcgaagtttatcatatgggacttctcaaaagggtgcccatccaaaattgtggattttggcctgcccgacatgcatagtggtagtaatgctggacaatgtttaaatccagcttttgttcactcagtaaaagttccagatgttgatatgttggacaaaataggcaagatatgtgttgtggcaaggggtgatggtgttattgatgtgattaatacagaatcagaacttacagccacaaaacctaaaagttccacgaaatcccgaaaaggaactcagtccaaaggaagcgacggtggagttcccgatgaaaatggaagaaaatggttgcatttagattactctttaggtggtcatactgctgccgtgtcttgcatgacattntcgttgtttggagag

SEQ ID NO: 4097 - DNA, 385 bp, Gossypium hirsutum
  unsure (1)..(385): unsure at all n locations; Clone ID: LIB3493-003-P1-M1-E5
aatatgtagagcagagacaatgagaggaacattgacgttgacttggattctgatggtgtgcctcttccaagtagcggtgcagagccaatactactctgagagcttaccatatgatcccaggccggttaaggtcactaatctttacttctttttgcatgaaactctccgcggtgagaacccaacagtagtcatggtagcccaagctaacaacacatgcaacgacaactactcatcagtgccatttggcaccctatatgccattgatgatcccctcaagataggtcctggggacaactcanaggtgattgagaatgctctgggacttgtgatcttgtgcggcaaaaaatcaacgaccgaggtgatgtacttagaatttggatttact

SEQ ID NO: 4098 - DNA, 416 bp, Gossypium hirsutum
  Clone ID: LIB3493-003-P1-M1-E6
cggacgcgtgggatcctatatcccccttgtaaaacactttgctttcgatctgagaatgtgccaagagaaatcaaatcctatatcttcaatttctgatagaaaattcacgccacgaggcataggtcattgacaaatttgcaagtacttgaatttgtgtgaaggaaagatgcaaaatcaggatggagcggtagctgatagggaaaaggaatctgctgtatccattcccatttctgaagttgatgactgggcaaacttcgcagatgatgatatcatgcagcaacaatctgccattcatgctgaggaggccaagaaaattccatttgttggtgacaaggaaccactctctatgttggcagctgaatatgaatcaagaagtcctatattgctagaaaaaataaaggtgcttgatcagcaat

SEQ ID NO: 4099 - DNA, 378 bp, Gossypium hirsutum
  Clone ID: LIB3493-003-P1-M1-E7
cgactctgtcgtggaatctccaactggtcatgaaactgctgcacattatgaaaacaacgatgaagaagattgccatgaggacattgagaatgattatgacaacgagcatggggttgattcttctgaaaatgctgctgatgatttttgtaaaggtatcactgaggaagaagatgagggagatatcgatgaaatttcaagactccatggggaaaagttcattgatgattacagttgcagtgattttcagcttgtgactagggttaaggggaataatgaggatgattataatgatgtccaggatgactcatgcacatcatacgagtatcaaggggagcaggttgattcccatggtctgcctgagacggcgatggatgcaaa

SEQ ID NO: 4100 - DNA, 405 bp, Gossypium hirsutum
  unsure (1)..(405): unsure at all n locations; Clone ID: LIB3493-003-P1-M1-E8
cggacgcgtgggcggacgcgtgggcggacgcgtgggcggacgcgtgggctgggacttgngatcttgtgcggcaaaaattcaacgaccgtggtgatgtacttagattttggatttactgccggaaagtttaagggcagctctattagcatattttcaaggaatccgttaataaagatggaacgtgagctttcggtggtgggaggaagaggagaattcatgatggcagaagggtatgcacgactcaagaattactttttcgatggcaccactgttattattgaatataacgtgagcgctattcattactaagaggacattctcttggactgtgcaaaattcacatggctttgcagcacttgattagaataaatgtttgagaaatttagtaaatttcatcatactttt

SEQ ID NO: 4101 - DNA, 478 bp, Gossypium hirsutum
  Clone ID: LIB3493-003-P1-M1-E9
cccacgcgttcggcgaacatggcgataggagttaaggccttgcacttgtcctttgagcctcatgccctcgcgattgccggcgctgttatggtattggtttggtgcattcacttcaggggtggattagcttgggaatcttctaacaaaaatctcatctttaatctccatcctgtattgatgttgattggcttcattatcttaggaggtgaaggtaaatcaaatccaacattccttgatacaaacaaacagcttgctttctagtttgattgacaaaaacaaatctaaaacatgttcccaacattgcaaaaaatgcagccattatgagctacaagtcattgccactgaagaaggaagttaagaaagtcatacatcttgtgctccatgccactgctctgattctaggcattattggaatctatacggcattcaagaatcataatgagagttcaatacctaatctctacagcgtgcattcttg

SEQ ID NO: 4102 - DNA, 391 bp, Gossypium hirsutum
  Clone ID: LIB3493-003-P1-M1-F1
gttctgcatttcctttgggttttccgagtcagtttcccagttgattaatctctgaagcctaaattattgcccagttcatccaatttctggacttgaaaaaccctagattgctttgcggacatggctggccaatctgatcctcatatctctcttttctcagccgaagaggtggaatttatggctgaagatgaactgatagagattgtcccaaacatgcgaatggatcctctcaatttcatctgcggtgattttggtccatttttaccgcaaatagcatcccaggtgccgttgtggctcgcggtggctttaaagaagagaggaaaatgcgcaattcggcctcctcagtggatgtcagttgaaaatttgacccgggttttggaaggagaacgag

SEQ ID NO: 4103 - DNA, 361 bp, Gossypium hirsutum
  Clone ID: LIB3493-003-P1-M1-F10
gtactttcttcttgtatgagttgtctcctctcttcatctgccatgaggggaacttagggttttgtctatcttccttctttcctccccttatttcttcaaagctctctgtttccattgttttgaataaaaaaaaaattaaaacttcccccctaaatccctgagcttgaccgtagctcaaaaccctagcttccatggcaaaaacaagaccaggaatttctggcaccaagcccaaacaagggaagaaggacctcgactcttacaccatcagaggcaccaacaaagttgtcagagttggggattgtgttctgatgcgtcctttcgacactggtaagcccccgtatgtggcacgagttgagaaaat

SEQ ID NO: 4104 - DNA, 424 bp, Gossypium hirsutum
  Clone ID: LIB3493-003-P1-M1-F11
gaccaactcggccaacaagtagctacttcaatcggttcccacaattggacttacattcgctgcgacgttaccgatgaaaaccaagtgaaaacattggtcgaatcaagtattcaaaagtatggtcaacttgatataatgtttagcaatgctgggattataaagtagtccgatcagagcattcttgatcttgatttccaacagtttgatcggttgatggcggtcaacctccgtggcatgtctgcatgcgttaagcacgcggcgcgtgcgatggtggagaacaaggtgagaggaagtattgtatgcacggcgagtgtcgcggctagccgtggaacgaaacggcggacggactattgcatgtcgaagcatggggtgttgggattagttcgattgggcaaagtaacagctaggatgtatggtataaggg

SEQ ID NO: 4105 - DNA, 151 bp, Gossypium hirsutum
  Clone ID: LIB3493-003-P1-M1-F12
gtgagagtaaaaaggcagttgagaactctcccttccttgagaagctgaagaagaaaggttatgaggtcctttacatggttgatgctattgatgagtatgctgtcggacagctcaaagaatttgagggcaaaaagcttgtgtcagctaccaa

SEQ ID NO: 4106 - DNA, 370 bp, Gossypium hirsutum
  unsure (1)..(370): unsure at all n locations; Clone ID: LIB3493-003-P1-M1-F2
ggacctggaatgcctctttcaaaagaatctttggctgaagctaaacgtagattggaagcattggacaagaaggatgcagagcgaagaagaacagcagagttaaaaaataaccttgaagaatatatatatgctacgaaagagaagcttgaaacatctgaagactttgaaaaagtatcttcaaatgatgaacgccaatctgttatcaaaaagcttgatgaggttcaagaatggttgtatactgatggtgaagatgcgagtgcctcggagtttcaagatcgtctaaattcattaaaagcgacagctgatccaatattttntccgattaaggagttgactgcacggccagaagcggtagaagtgctcgacaata

SEQ ID NO: 4107 - DNA, 424 bp, Gossypium hirsutum
  Clone ID: LIB3493-003-P1-M1-F3
cggacgcgtggggtgaaatccaaagctggaaagaaatcggggaaggctgccaaggatccaaacaagccaaagaggcctgctagtgccttctttgttttcatggaggagttccgtgagcaatacaagaaggatcaccctaaaaacaaatccgttgcggctgtcggcaaagctggtggagataaatggaagagcttgtctgaagctgaaaaggcaccttatgtagctaaggcagaaaagcggaaggttgagtatgaaaagaacatgaaggcctacaataagagacaggctgagggtcccaaagacgaagatgttgagtctgacaaatcagtgtctgaggtgaatgatgaggatgatgatgaagaaggcagcggagacgaggaagatgatgagtaggaaggtccgtggtggatagcataatcaatgt

SEQ ID NO: 4108 - DNA, 289 bp, Gossypium hirsutum
  unsure (1)..(289): unsure at all n locations; Clone ID: LIB3493-003-P1-M1-F4
taaaacgtgcttagaaaattgctttataaaaacacaggaaacgctacagtttctgtcaacgtccatgggccttggtatataaccttgattggcaatatgtgattgtatttgtagatttgtggaaggaataagaagaaacataaatacaatgcacacctgtaaatataagtgtgtacaaactaaaaccctgcacttaactgtggcgtttcctgtgttttaataaaacgtgcttagaaaattgctctataaataaaaaacacttntattcctcacttaaaaagacactctg

SEQ ID NO: 4109 - DNA, 491 bp, Gossypium hirsutum
  Clone ID: LIB3493-003-P1-M1-F5
cttgagaagccagttgctgttgatgtagatcaattgaagaaagagacgttttctagccgcatccatcttcgtgtgtgtttagatggaggatatcatgtacttgatgaatctactcactacagcagggatctccgcccaacggcaaagcaactctggaggccaccaattggtgtcctggaacttggcatcttaaatgctgtaggtctccatcctatgaaaacacgagacgggaggggaacatcagatacctattgtgtggcaaaatatggtcacaaatgggtccgcactcgcacccttgttgacaatttatctccaaaatacaatgagcagtacacttgggaagtatttgatccagcaaccgttctcaccgttggtgtattcgacaacagccagcttggagaaaagggttcaaatggaaacaaggacctgaagattgggaaggttaggattcgtatttccacattggaagcaagtcgtgtctacacacattc

SEQ ID NO: 4110 - DNA, 521 bp, Gossypium hirsutum
  unsure (1)..(521): unsure at all n locations; Clone ID: LIB3493-003-P1-M1-F6
gcattgtgaatggcatggatgttcaagaatggaatcctgcctctgacaaatacatcagtgtcaaatatgatgcaacaactgtaatgaaggcaaagccattgttaaaggaagctcttcaagctgaggtgggattgccttgcgacggagatgttcctttgatcggattcattggtaggctagaagagcagaagggttcagatattttggcagaagctattccgaaattagttgctgaaaattgccagattgtagtccttggcacaggcaaaaaggccatggagaagcagattgagcagctggagatccaataccctgacaacgttagagcagtagccaaattcaatgtcccattggcccatatgattattgctggtgctgattacattntggtccctagtagattcgaaccatgcggtctcattcagctgcatgctatgcgatatggaacagttccgatagttgcctctactggtggactngttgacacagttcaaggagggatcacagggttccaaatggag

SEQ ID NO: 4111 - DNA, 416 bp, Gossypium hirsutum
  Clone ID: LIB3493-003-P1-M1-F7
cggacgcgtgggctactgtcagcacatcgatgtccgtatcagtcagtttgcaacctccttttacttgcatcattctactgacaatgacatcttttgttgctggattcatctttaaaaattgagctcatggtttgagccgttttaactctttccggggaagaaacgatgatcttagagttccgaaatgacttagtcatagcagccaaggcttgttgaagatgttcattgcctggataagctgcaaaccaaaaaaaaaaagtagtgactttcacatgaaatatacaagatgtttaatgttaggtgctatttaaggctacattagaataggcacagagatgatcttggatatgtgttttctatcaagtagtggagtttataggtttgaaaaggacccttttgatgattttgtgcattaa

SEQ ID NO: 4112 - DNA, 331 bp, Gossypium hirsutum
  unsure (1)..(331): unsure at all n locations; Clone ID: LIB3493-003-P1-M1-F8
tttttctcttctctcgctgttatcaatggagccgtttctcgacgacttagccgacgatctacagagcttaagcttcacctccacttccactgctacaattaaccgcagcaccagctcagggtctgcctccaactccggctcttcctctcttgctccctcggctcacggctccttctcttccaaaaccatccgttccagctccccctccctagccgacctacgcttctctatccgcctcggctccggcgatataggctccgtctacttagccgaactcaagtctcaacccacgcnnctccgacaccaatgccgcgatgctaacaacaacagc

SEQ ID NO: 4113 - DNA, 319 bp, Gossypium hirsutum
  Clone ID: LIB3493-003-P1-M1-F9
caatatctcgtcaatcatattcttacacttactcttatacctgtcatggctggtgttcttattgaggttcttcgtttaggccctgctgagattgttaatctctggaattcccttcattttgatcttgttcaaatcttgtgctcttgtttctttattatctttgtagccactgtttacttcatgtctaagcctagaagcatttaccttgtggattatgcatgctacaaacctcctgtcacttgtcgtgttccttttgctactttcatggagcactcgaggctgaacttgagcaacaaccctaagagcgttgagtttcaaa

SEQ ID NO: 4114 - DNA, 186 bp, Gossypium hirsutum
  Clone ID: LIB3493-003-P1-M1-G1
catgcttactatagttggtgtcacatcaaacacacatcctgctcaactcgctgtaaggtttgcttaatcttaaaggcctacaaaggtggcccttgttcctattgcactgtatggagaccccatcaatctatatcttgataccaattgtgctcttgatactatatgttatgtcgaagcccaacttat

SEQ ID NO: 4115 - DNA, 363 bp, Gossypium hirsutum
  Clone ID: LIB3493-003-P1-M1-G10
cccacgcgttcgcggatacaattgacaatgtgaaggcaaagattcaggacaaggaaggtatccccccagatcagcaaaggctcatctttgctggcaagcaattggaggatgggaggactttagctgattataacattcagaaagagtccacccttcaccttgttcttcgtctccgtggtgggcagtgagaagttaattcttcttctgtctttgttctagcttaagatggtcacaaataagcctttaggaaagtgcctattttcttatctcttaatgtaacatgttaatctaagtaaaccttctgtttggaataaaagtttggtgatttcgtaaaagaaaaaaattttttttcctgcaaatttt

SEQ ID NO: 4116 - DNA, 234 bp, Gossypium hirsutum
  Clone ID: LIB3493-003-P1-M1-G11
aaaaaaaatctctgaaatggcgatgaaaattttcagcgttttcttctttgctctcctgttcctcgcatattctttccttcaagttgctaggtgtcaatcaaaagcagaggcagatgttgcaaaagctgttgaaggaggtgatctcggtattgttggggaggatgttcaggattttggtgatcctaattacagttcagctcctgaagttaaaactgtttgcgttttccccaaaaa

SEQ ID NO: 4117 - DNA, 379 bp, Gossypium hirsutum
  unsure (1)..(379): unsure at all n locations; Clone ID: LIB3493-003-P1-M1-G12
ggattntgcttatacttccagcaataggtctgaaatatgtaatcccaagccatcaccacagagttacctgccaaatgagcatatctgtggcagggccttgggtctccggtttgataagaacactggtgatttgtacattgctgatgcatatttggggctgttcaaggtgggtccggaaggcggattagcaacaccacttgtaactgaggtagatggggtgcccctgaggtttaccaatgaccttgacattgatgatgaaagaaacatatattttactgatagcagcagcaaattccagagaaggaacttcatgcagctagttttttcttcggagaatagtgggaggcttcttgagtataatctttacacaaaggaaact

SEQ ID NO: 4118 - DNA, 468 bp, Gossypium hirsutum
  unsure (1)..(468): unsure at all n locations; Clone ID: LIB3493-003-P1-M1-G2
gagaagcagccgtaaagctcgaaactctgccgccatgggtcgtatgcatagccgaggtaagggtatttccgcatctgctcttccgtacaaaagaactccacctagttggctcaagatctcctctcaagatgtggaggagaacatttgcaagtttgcgaagaagggtttgaccccatctcaaattggtgtcattctccgtgattcacatgggattgctcaggtgaagagtgttacgggcagcaagattttgcggatactgaaagcccgtggtcttgctcctgaaattcccgaagatttgtaccacctgattaagaaagctgttgccatcagaaagcatcttgagaggaaccgcaaagacaaggattccaagttccggttgatcctggttgagagcagaatccatcgccttgctcgctattacaagaagacaaagaagcttncacccgtgtggaaatacgagtcgactac

SEQ ID NO: 4119 - DNA, 347 bp, Gossypium hirsutum
  unsure (1)..(347): unsure at all n locations; Clone ID: LIB3493-003-P1-M1-G3
gagacgcgtccgtacgaagactgtgaagaaatcgtctcgtcaggtaatcgagaggtactactctcgcatgacgcttgatttccacaccaacaaaaaggttatcgaagaagtagctattatcccatccaagaggctccggaacaagattgctgggttctcaacccatttgatgaaacggatccagaagggtccggttcgtggcatttctctgaagcttcaggaagaagagcgtgagcgtcgtatggattttgtccccgatgtatcggctattgctgttgattcaatagaagttgataaggaaaccatngatatgctntcacttcttggaatggccgatcttnctggga

SEQ ID NO: 4120 - DNA, 361 bp, Gossypium hirsutum
  Clone ID: LIB3493-003-P1-M1-G4
ctgaagctgagtttgttgatcaaatcattggtcttgtaactcgcatgcatgaacggcttgtcctaataaaacattcgcagacttgtagcccggttcccatacctgctgatttctgctgccccctttccctagagctaatgactgatccagtgattgtggcatcaggacaaacctatgagcgggctttcatcaagaaatggattggtcttgggctcattgtgtgccccaagacacggcagactttggctcataccaatcttatacctaattatacagtgaaggcactaattgcaaactggtgcgagtcaaacaatgtgaagttgcctgatcccatgaagttcatgagcccccttcttttgca

SEQ ID NO: 4121 - DNA, 328 bp, Gossypium hirsutum
  Clone ID: LIB3493-003-P1-M1-G5
caagcacccttctttatcatccttcaaccattacctcactctcacccatttggctcaagagatcaaccgccgcactaccatcactgttctcgccttagacaacgccgccatgtcctctctcttgaataaaaacccttccatttacaccatgaagaacatcctttccctccatgttcttcttgactacttcggtgccaagaagcttcaccagataaccaatggcaccgcactcgccgctactatgttccaagccactggggtcgcccctggggtttccggctttgttaacataaccgattttaaaggtggaaaagttggttttggagct

SEQ ID NO: 4122 - DNA, 370 bp, Gossypium hirsutum
  unsure (1)..(370): unsure at all n locations; Clone ID: LIB3493-003-P1-M1-G6
tactgctgttggtgcatcaaatgcagatgagattaggcaatacattgattccgcatcgaagtccaaatcatctgccactgccactattctctttaaagggactcggttaggggtgaggccagctccggttgtggcctcattttcagctcgagggcctaatcccgagaccccagaaattntaaagcctgatgtgattgctcctggattgaacatccttgctgcctggcctgataaagttggtcctgctgggattccatctgataaccgaaagacagagtttaatattctttcaagcacttcaatggcttgccctcatgtttcaagattggctgctttgtttgaagcagctcatccttgatggagccctgca

SEQ ID NO: 4123 - DNA, 368 bp, Gossypium hirsutum
  Clone ID: LIB3493-003-P1-M1-G7
agtctatgcagctgagaaaacctgcatttgagaagcaccactttcatggctaccaaaatcctagcatcttcaagccatagtttcgagaacgaatgcaaggaaattcacgaatcacggggaagatggaaccacttgattcgagctttggtcactcggactcagctcgaatgcaggggaatcagagagacttacagggacatgtatggggaagatatgataactctgctgcaaaaatctagccttcgaaatcagcctggtgtttcccccaaaacttgcgcagctgtgtacctttggatgcttcattctcatgaacgtgacgccattggtgctcgtgaagctcttctgcaagataatgattctaattatca

SEQ ID NO: 4124 - DNA, 458 bp, Gossypium hirsutum
  Clone ID: LIB3493-003-P1-M1-G8
ctcaatgttatgaccgaaccctggtgtcgcctgtttaaattcatttttccatttcttattaaagagaaaaacataaaagtaaccagttccggcagactcatggcgatgctcatcggaaatccactcatcaaggctttctttattattttcctggtttcagccgccaccgccaccggcgacgcccccttcataatcgctcacaagaaggcatcgctgaacagactcaaatccggcgccgaacgcgtctccgtttccgtcaacatctacaaccaaggcttcacggcggcatatgatgtgagtctcattgataatagctggcctcaagatgcttttgatattgtcagtggcaacacttcacattcatggcagaagcttgatgccggtggtcatctatcacattcatttgaattagaggccaaaaggaagggaatgtttcatggtgctccagcagtcatata

SEQ ID NO: 4125 - DNA, 457 bp, Gossypium hirsutum
  Clone ID: LIB3493-003-P1-M1-G9
ggaaacagaaaattctaaagaaaccggtgaaatcgaaccactcttacgggacccaagggatgagcctaaatccgaagccaacccgaatccgaccaccgtgaagacgagagtccccgaagtagagatccgattgtatcgacaaggcaagggtccgatcgacgtgttcaagtcgagcttgggtggatgggaccagaaccagcttgaggttcgagacatactcgacaaatacggcttgaaatcgatttacgctttcagtccccagtcgggtcgtggcgtcccaatccgctttcatcccagaaatgggaggtctattcttggatacaaggacggatcggtggttcacattgacggcgagccacaggattcattaatcaaacctgtaaccaagatcttggtaggagtagcagctattacacttctgataactctggtagccaaagatactccggaatggatg

SEQ ID NO: 4126 - DNA, 70 bp, Gossypium hirsutum
  Clone ID: LIB3493-003-P1-M1-H10
tcttttattttttgaactttggaggtttagtgggagagatatacttagctgtgtgtgcatgtgacttcat

SEQ ID NO: 4127 - DNA, 122 bp, Gossypium hirsutum
  Clone ID: LIB3493-003-P1-M1-H11
ataaaattaagcaatcatggaggtggagatggacatgatggagaacttgccatctaccatatccccattactccttcggtcgatggctttttctgtttatacttatgctgacaaattgttta

SEQ ID NO: 4128 - DNA, 217 bp, Gossypium hirsutum
  unsure (1)..(217): unsure at all n locations; Clone ID: LIB3493-003-P1-M1-H3
acgnnaagatctctttagtttacgtttttttgtccttttggattatttgatactaaaaaagggaagcaaataagaatggaaatggagggcaaataataggatgttagattgggagccaacaagttcacagagaggcaaccaattgtgaccgtggctcatactcaagatgactggaaagactattctgaaccactaccgactccatttttcgagcctg

SEQ ID NO: 4129 - DNA, 351 bp, Gossypium hirsutum
  Clone ID: LIB3493-003-P1-M1-H4
gtgcctgctgatgacttgacagatccagctcctgcaacaacctttgctcacttggatgccacaactgtgttgtcccgacagatctctgagcttggtatttatcctgctgtggatcctttggattctacatatcgtatgctctctcctcatatttagggtgaggaacactacaacactgctcgtggtgtgcagaaagttctccaaaactacaagaacttgcaagatattattgctattttggggatggacgagcttagtgaagatgataagataactgttgctcgtgctcgaaagatccaaaagttcttgagccagcctttccacgtggcataagtgttcactggtgcccct

SEQ ID NO: 4130 - DNA, 394 bp, Gossypium hirsutum
  Clone ID: LIB3493-003-P1-M1-H5
gctatgatagcagttgaaattgattccgatgactcggttgaggagcatgttaaagtggaggcaaaggtagccaattacaaaaaatccagaccgtcaatgttggataatggtgaagcagaatcaggttatctgaaggaaaaagccaacgaagatgcgtattcctttggtaaaaagagaggaagagtgaagctaaagaagttgcccttgagcatttgttcctatagggatcgagtgaatcttaaggaagagatgattactaagaacatgggcaattcgactgctgttgttaaacctgtgtttttctctggaaccctctgctgatggttttcaaggactctgcatgtatcgaacaaaagtatatcatgcaatcataaaatttgagttatggtcatat

SEQ ID NO: 4131 - DNA, 353 bp, Gossypium hirsutum
  Clone ID: LIB3493-003-P1-M1-H6
ttatgatcaatgctctggtaaaataccggaagatgagatgttgaagaacaagattcttccaatgttcccaccagttttccaccaatggtttttaactactttttcagagcccgctgcttggtttagagctcgagttgcttatgctcacacaacagctgtttggtctatggttgggcatattgtgggtctgggtgaccgacatggggagaacattcttttcgattctaccacaagtgactgtgttcacgtcgattttagttgcttatttgataagggattgcaattggagaagcctgagctggtgcctttcaggctaacgcaaaacatgattgatggactgggcattactggat

SEQ ID NO: 4132 - DNA, 370 bp, Gossypium hirsutum
  Clone ID: LIB3493-003-P1-M1-H7
attttaattctttgttcttcattttccctgttcttcaccaactaaaataatcaaaacccattgtatctttctccttgtttcactctgcagatcctcccccattcattcaaacaccaaatcaaaagttcattttgttccttttctcattgtcactctccacatcaatacttcccccaatttttttttctaaaaacaatgtttcgaattcaactgttggtttcggttttgctttgttgcttcaccttttggttccacatttcatttgggtacttgataacgtgctcggggatagttccgatgaggtaccgcaacgataaggtatcgataacggatttcggcggcgtcggtgatggaaagacactcaatacga

SEQ ID NO: 4133 - DNA, 429 bp, Gossypium hirsutum
  unsure (1)..(429): unsure at all n locations; Clone ID: LIB3493-003-P1-M1-H8
atagagtcttgactgtaagcccatactatgcccaggagcttgtatctggtgaagacaaaggtgtagaacttgataacatcattcgtaaaactggcatcaccggcattgtgaatggcatggatgttcaagaatggaatcctgcctctgacaaatacatcagtgtcaaatatgatgcaacaactgtaatgaaggcaaagccattgttaaaggaagctcttcaagctgaggtgggattgccttgcgacggagatgttcctttgatcggattcattggtaggctagaagagcagaagggttcagatattttggcagaagctattccgaaattagttgctgaaaattgccagattgtagtccttggcacaagcaaaaaagccatggagaagcagatngagcagctggagatccaataccctgacaacgttagag

SEQ ID NO: 4134 - DNA, 399 bp, Gossypium hirsutum
  Clone ID: LIB3493-003-P1-M1-H9
ggattggaagagattcttctagacttagtgaagatttaaaggtcttattgtcgcaattatcttctcgagggatggagcaattgatgagtgatgtaagtcctaggatcgctgcaagtccgaggattgttgtaagtccaaggatatctataaacagtgatgatttaaaagcctcagattcttctgcatttaatggaattgagatacttcaaaggagggtctcattggagagaaatgagtctggtttatcattagatggaagcattgttagcgaaatcgaaggtgaaagcgtggttgatcggctaaaacgacaggttgagcatgacaggaaactattgagtgctttgtataaagaattggaagaagaaagaaacgcgtctgcagtctctacaaatcaagcga

SEQ ID NO: 4135 - DNA, 294 bp, Gossypium hirsutum
  Clone ID: LIB3493-041-P1-M1-A1
gctgtgacattgttgcattcaacaagatttagaggactcagtttttttctacagcagttgagagtgccattggccatgttatcaccttttgccccttgctttcccatcgaatatatatatttttgcttgaaccgtgctttgctagcgcttctgctctatagtgagcatagatgaaaaggattttcaagtatttaaggatgttctatgttttttatttacttaaagcttgcccaaagtagttttagtgacattgcagattgcataagcggaaatggaagtcatgactgttttgaa

SEQ ID NO: 4136 - DNA, 279 bp, Gossypium hirsutum
  Clone ID: LIB3493-041-P1-M1-A10
ttctagttcttctgacttttgggtgatggtagcagctttgaaggagttcattgcaaatgaaggtggtggggaggtaccacttgaggggtcgataccagatatgacatcttcaactgagcattatgtaaacttgcagaagatctatcaggctaaatctgaggctgattatcttgttcttgaagaacgagttaggaatattcttaagaaaattggtagagatccacatagtatccctaaggcgacaataaaaagcttcagcaaaaacgcttgaaagctcaa

SEQ ID NO: 4137 - DNA, 344 bp, Gossypium hirsutum
  Clone ID: LIB3493-041-P1-M1-A11
gaagaaacaaagcgctctctctttgtgaatccaatcaaatcgaagatgttgagagtggcaacgaggcggctcacttcttgttcgtctgcgtggaggtcgcaccaggccacctccgctatcgcctctcgtactttcatcgacggctccgattcttctgattgtctcagatccaatttctcctcctcctcattttccttctctttcgcttctcaattccttcttcccaccagaggttttgcttctgagtcactcaccccaaaaagtgaccacagtgtgattcctgatgttccagcaacagtggctgctattaagaaccccagctctaaaatagtttatgatgaata

SEQ ID NO: 4138 - DNA, 354 bp, Gossypium hirsutum
  Clone ID: LIB3493-041-P1-M1-A12
ggtttctactgctagtttaggttaggggctaattatttgggcttagggtttttactattgggctgttctgattgggtctatttttggatttgtaatggatttggtttattttgggtttgggtttgatttggtgggccgggcaaaatgggttcgtatagaggacagagaagatggccaatagatagacaaggtcggtgttccaattagggattggtgatgcataagaaactggagtttggagatggttcttggtcaacatagagcatgtgtttttgtcatgatccgtgagcaaagctaccagaagtactagatcgagatcggaacgatgcgagcaccagaaaacctattcacaaa

SEQ ID NO: 4139 - DNA, 442 bp, Gossypium hirsutum
  Clone ID: LIB3493-041-P1-M1-A2
gaaaggcaacggaaggagaggatgttgacgagatcaaggccaagatagatgcagcgaataaagctgtctcaaagattggggagcacatgtctggtggttctggtggtgcccaaggaggttcttctggaggtgctcaaggtggtgaccaggcccaagaagccgaatacgaggaggtgaaaaagtgagtgatgaggcactaattctgttcacagcttgtatttttttttcaagtggaaaaaaaggccactggagagatgatcgttttgtttgatgatgatgcatagggtgtttactgttttgcagttttatatctaaatgaagaaggttgaatgtaaaataatagcctgttaggaattggagtccacagacctttcaacatgagataaattttttcttgaagaaatggagaaataaggagattcctttaatagtagaaaattta

SEQ ID NO: 4140 - DNA, 305 bp, Gossypium hirsutum
  Clone ID: LIB3493-041-P1-M1-A3
cggacgcgtgggccgggagtgatttaatatggactcaatgcaagccttgtgcccaatgtttcgatcaatctaccccgattttcgaccctcaaaaatcttcgacgttcaccaagttgtcatgctcgagcgacctatgtgaagcacttccgcaatcaacatgcaacgatggatcatgtgagtatctctacacatacggtgattactcctcgacgcaaggggtcatggcaaccgaaacattcaaatttgacagtgtttcggttcctaatattgtattcgggtgcggagaagacaatgatggggacggt

SEQ ID NO: 4141 - DNA, 400 bp, Gossypium hirsutum
  Clone ID: LIB3493-041-P1-M1-A5
atggtatcgcttaagctccagaaacggctctcagcgagcgttctaaagtgtggaaaaggaaaggtttggctcgatccaaatgaagtcaacgagatctccatggccaactctcgccagaatataaggaagctggttaaagatggttttatcatcaggaagccaaccaagattcactctaggtctcgtgcacgccgcatgaaggaagccaagagaaaggggcgtcactctggttatggtaagcgcaagggtacaagggaggcaaggttgcccacaaagatcttgtggatggagaggatgcgtgttcttgagacgcttgctccgcaagtatagggaatcaaagaagatattgacaagcacattgtccaatgacatgtacatgaatagtaagggttacgtgttc

SEQ ID NO: 4142 - DNA, 236 bp, Gossypium hirsutum
  Clone ID: LIB3493-041-P1-M1-A6
ctttgaggttttaggaaaacagcagagaaattaaggaatggagaccttcctatttaccggggagtctgtgaacgagggacatccctacaagctatgtgatcagatctctgatgcaagacttgatgccttgttggcacaggattctgagagcaaggtggcttgcgagacctgcatcaagacaaacatggcgatggtgttaggagtgctccatacctgagccattcttttcttatagt

SEQ ID NO: 4143 - DNA, 396 bp, Gossypium hirsutum
  unsure (1)..(396): unsure at all n locations; Clone ID: LIB3493-041-P1-M1-A7
aaagaaaaaggaaattactttgtctgtgggaaaagtcggagagccgccatgtttggccgccggcggagtgcataaagaatctccccaagccaaacactgccagatctgtctttgaggataccatttattggccgttagggtttcactgtctcgattttccgatcgtagttcaactgaagcgttcaattacatgtcacctccataaatctgaattcttttgtttgcctcctaatttagcaatcgaatttttgatatttggcgtgatagaaatccaatcccactttgtgngcttgttttttacctacgaaagggacgagaaaaaaaatactggattcggtctcagaaatgggtgatttagtgcctatttacctcggcattcttgcttttttttgtact

SEQ ID NO: 4144 - DNA, 434 bp, Gossypium hirsutum
  Clone ID: LIB3493-041-P1-M1-A8
cgatccttttccactgatctgcccgccgctcacactgccgatgccaccgttatggaggcctggaacaaagtcatgcccaacatggatcctcctaagacccctctatctttcatgcaccctcgcccgcctaccccttcctccattccttccaaactcactgtcaatttcgttcttccttatgcttctgagttgtccaccaaagaggttgacatggttatagtaccagccacaaccggacagatgggttttcttccaggacatgtagcaacaattgcagaattgaagcctggtgtgctgtcagtgcatgaaggaagtgaaactacaaagtattttgtcagcagcgggtttgttttatccatgccaactcatttgcagatataattgctgtcgaggcagtgccactcgatcggattgatgcaaaatttgttcagaaa

SEQ ID NO: 4145 - DNA, 203 bp, Gossypium hirsutum
  Clone ID: LIB3493-041-P1-M1-A9
cagcttagttcaacttcacacccaccaccattggctgtttgtgatcattcgaaaaaaaatggtgaccggggaagaagttcttaagggttaacgtgcccaaaggccttgcaccgtgttgggcatctgcacattaaccccgccttattgtgttgatcagagcacataccctgactactattttcgtgttacaaatagtgagcaca

SEQ ID NO: 4146 - DNA, 381 bp, Gossypium hirsutum
  Clone ID: LIB3493-041-P1-M1-B1
gttatttggttccatttgttctgacttgaatcttgcagttttgctgacaattggtctaatgtgttgacaggaaggagtggagttgtctttgctgttaagttataccctgctggtgccaccacaaattctcaagatggtgttacagatctgtttgggaaatgtctaccagttcttgaagagatggttgaggaaaacatgccgttactggttcacggtgaggtcacagatcctgatgttgatgtttttgatcgcgagaaagtgttcattgacactggtttgcaacctttaattcaaaggcttccaagactaattgttgtgatggaacatatcaccactttagatgctgttagatttgttgagtcctttgtagcatgttttttg

SEQ ID NO: 4147 - DNA, 373 bp, Gossypium hirsutum
  Clone ID: LIB3493-041-P1-M1-B10
gcccatgatccatttgatatattccaatccttctttggtggcaatccttttggtggtggcggtagcagccgaggccgaaggcaaagaaggggagaggatgtaattcatcccctaaaggtttctttggaagatctctataatggaacttccaaaaagctttctctttcacgcaacataatttgctccaagtgcaagggtaaagggtctaaatcaggtgcatcaatgaaatgttctggttgtcaaggttcatgaatgaaagtcttccatcagacaccttggtccttccatgatccaacagatgcagcacccttgcaatgattgtaagggtactgttgagaccattaactattaagaccgatgccaccaatgcaaa

SEQ ID NO: 4148 - DNA, 496 bp, Gossypium hirsutum
  Clone ID: LIB3493-041-P1-M1-B11
catggaatagagatacggattgctagaatcttcaatacgtatggcccacgcatgaacatcgatgatggacgtgttgtcagcaatttcatagctcaagcacttcgcggtgaaccactgacggttcaaaaacctggaacacaaactcgcagtttctgttatgtctccgacatggttgatggtcttattcgtctcatggagggggagcacactggtccaatcaatattggaaacccaggtgaatttaccatggtcgagcttgctgagactggtaaggagcttattaaacccgatgtggaagataaacatggtggagaacactccggatgatccacggcagagaaaacccgacatcacaaaggccaaagaattgctaggttgggagccgaaagtcaagttgcgggatggtcttccgctcatggaggaagattccgattgaggcttggatctctaaggaggatcaaactattagcggttatactaatagagatgagatcac

SEQ ID NO: 4149 - DNA, 371 bp, Gossypium hirsutum
  Clone ID: LIB3493-041-P1-M1-B12
tttttatttatttatttttaacatgtttgaggaatcagtttcagctcttcgtatatgaagctttcccctgttttcaaattctcatttgttttacgaacttagaatcatcaaaattaagggtttgaattcgataaaggaatcatttcgtaatcttaggaagaaagaatttagcggagtttcgggaccatgaatccgtattttccggtgaaggaagagtatccgaactcgagttattcacagtccgacgatgacccgccggtgatgatgatggggccgtcgccaccgcagccgatggagggtttttacgattcaaggccaccgtcgttcctcacgaagacctttgacattgttgatgagcctagcactaatta

SEQ ID NO: 4150 - DNA, 317 bp, Gossypium hirsutum
  Clone ID: LIB3493-041-P1-M1-B2
ctttagttttcccttttgtttctgagaaatttgaagtgaatcaggacgtggattagccagcagtatcagatgtgaagctcctgtatcgcgggaaattttgaagctcagttcttttggaataaattagactcaataagaaaatttaccaaaaacaggaaaatggcaactccagctgagcctcctaacggtaatcattaccaaggaaaacattactattcgatgtggcaaacgacgttcgaaatcgacaccaaatatgtgccgatcaagcctattggaagaggggcgtatgggattcgctgttcttctgtgatttgttt

SEQ ID NO: 4151 - DNA, 529 bp, Gossypium hirsutum
  unsure (1)..(529): unsure at all n locations; Clone ID: LIB3493-041-P1-M1-B3
agcgggtgcatgccagaggagtgggacctccgcccatcccagttgacgaattctcacttcccaagttggttggtgcaataaaattcatgctagatccaaaggtgaaggagaaggccaaagaacttgccaaggcaatggagaatgaggatggggtgactggagcagtaaaagcatttcttaagcatcttaatcacaagaagccggagagcgagccatcaccggtgcaatccggtctattctccatcagtagatgtttcagatgttcgtgaatcttgtatgtatgcttgtgtcttcctcgttgtgcgtgtcatgcagtgtccatggtgttttctttcctaatctgaaacccaacattcatgaaaccgtccctcttttcatatccccattccagctgcaattgttttaacagtcgagacacggntagtgtgaaacacanaatttcattcgtcttcaaggtagaaggcccattgttnttagtctttgagctacaatctatgtagggttgagtcttccattcatttttaaaaac

SEQ ID NO: 4152 - DNA, 342 bp, Gossypium hirsutum
  Clone ID: LIB3493-041-P1-M1-B4
aaaaaaagagagagaaagagagaagctgttcactttagcacaatttctgtctcttcatcaatggtggttttggtggagctttacgcaaacccaatactcacccaaccaaatattctctcttatttttatttttcttttgatagagaaatgaaaggaaagacccagtaaattttttttctcttctaaactcctttcgattccaaataaggtttttttttcttttcattttcttggggttttgagggaaaaatggaaaacctataaatttttacttggaactggatcgaacctggttataaaggctttcctttataaatatttgcaaaaaattccgggttattt

SEQ ID NO: 4153 - DNA, 340 bp, Gossypium hirsutum
  Clone ID: LIB3493-041-P1-M1-B5
cggacgcgtgggtggtgaaccaaaagaggaaattgtggctggtgatcaagctctaattgatgttggagttgagggatctctactcaaacctcaatctcacccaaccaaatattctctcttatttttatttgtcttttgacagagaaatgaaaggaaatacccagtaaattttttttttcttctaatcttctttcgaatccaaataagtttttttttttcttttattttcttgggttttttaatgaaaatttgtaaacctataattttttactttaaactgttttttactttgttttaaagccttttctttctaaatttttgctaaattttcccgtttatt

SEQ ID NO: 4154 - DNA, 249 bp, Gossypium hirsutum
  Clone ID: LIB3493-041-P1-M1-B6
cctcagcacactgttactccctcagctctgcgcgaaaccctaaagcaatgcctcccaaagcagctaaatccaaggaagcaccagcggagaggcccatcctcggccgattctcttctcatctcaagatcggaatcgtgggactggctaatggtgggaaggctactcttttcaacacgctcactaagctttcaatcccagctgagaactttcctttttgtacaatccagccttatggagcccgagttaatg

SEQ ID NO: 4155 - DNA, 297 bp, Gossypium hirsutum
  Clone ID: LIB3493-041-P1-M1-B7
atttttaactcactctcgactcagagagtccaattgtagcaaagcgtaaaaaggtttatagttttccttatcactgccggtaatgctttccggcagcaaagcgtgaacagaaaatcaagctttctcgatgccgctctctaaagattttttccctctgttgtcttcgcacggagaggaagtgcctgaaaatggatctgaataaggcgactttacagactcttacgaaacttgaacatgacatggcctattcacagagagatcagaggttccgacgttatcatttctaccgatgacaca

SEQ ID NO: 4156 - DNA, 169 bp, Gossypium hirsutum
  Clone ID: LIB3493-041-P1-M1-B8
cttcgcttaccggagcgatccaaggcctgaaacgctggcgtgctgcttggtccaacccaattcggggcgtttggatggcaacacgaaaatcaattacatgaacatgttcgacgctcaggtggacgctgttcgttctgcattggatgccatggggtttaagatcgtttaa

SEQ ID NO: 4157 - DNA, 273 bp, Gossypium hirsutum
  unsure (1)..(273): unsure at all n locations; Clone ID: LIB3493-041-P1-M1-B9
caatgggcttccacaggtgagcggcagctgcttgatggggaatgggtttgatnacatcaattcatgcatttcaaattctcaaatacttcttaacctcatatatatcactctaactttatctatcactacttcttttatataaatattactaacactcatactaattttttcaaattatttttatatatatttccctttactacaataatttcatttcactatttttataatttttcttctcaccttttctaattttttactttcccatatttt

SEQ ID NO: 4158 - DNA, 366 bp, Gossypium hirsutum
  Clone ID: LIB3493-041-P1-M1-C1
cctgtcggaggttgttcaagaaaaaccaaaagatcatcatcatcatccaaaaagcttcctgatttggttaataaccctaagatccatggaggccaagatctcaacttagcttacccagttagtgaagtttacaccacaagtatgtctgaatttgttaaagtccctaatagtagtgtagaaaacagtaagaaggaaattccttcttcattgttccctagatgtcatgtttcagctttggagttggttactggaatgtcatgcaaggggtggaatcctttcattcccatgccagttccagatccaaacacagtttatacgcctgggtttgccttgcacgagattaaaccagactctaattcctgcgtg

SEQ ID NO: 4159 - DNA, 212 bp, Gossypium hirsutum
  Clone ID: LIB3493-041-P1-M1-C10
ccactacctccccaccgtcgacctccttctaacctcaactggcttagatccccttctcttcgacgtcatccgcctcagtaaccccgatgtccgccgcacccttctcaccatctccaataactacacactcaacgccattatcgttgactttttctgcaccagcgcaacattcgaagtggccttcgatcctaaaccttctggttacttttttc

SEQ ID NO: 4160 - DNA, 305 bp, Gossypium hirsutum
  Clone ID: LIB3493-041-P1-M1-C11
gccgtttcttaaactgatctctttaatctctctctaatcttcaatttccgtcgctctcccactcgatattgaaatggcggaatcaaagtcattgaggaaacctggttttaccaagggggaccaacttcggcctggcactattgggcacactcttactggcaagggtggcaatacaaagatgggtttgcagaaaggtcgggctgatggttcctcagtgcgcgtcaaatgcgaattgctggatggcttggtggagaggaaactggaatgattatttttactggttggaaaggacaagtgggctttat

SEQ ID NO: 4161 - DNA, 466 bp, Gossypium hirsutum
  Clone ID: LIB3493-041-P1-M1-C12
atttttccatttcacagaagccagaaaacagaaatggtgtctttgaagctgcagaagcggctagccgctagcgtcttgaagtgcggtcgcggcaaggtctggctcgatcctaatgaaatcaacgaaatctccatggccaactccaggcagaacgttaggaaacttgtgaaggatgggttcatcatcaggaagcctactaagattcactcccgctctcgcgcacgtaggatgaaggaggccaagagaaagggaagacactctggatatggtaagaggaagggtaccaagggaggcaaggtggccaacaaagattctttggatgaggagaatgcggttactgaggcgattgcttcgtaagtacagggaatcccagaagaatgacaagcacatttaccatgacatgtatattgaggtcaagggtaatgtgttaagaacaagcgtgtcttgatgtgaagttttcacaagt

SEQ ID NO: 4162 - DNA, 266 bp, Gossypium hirsutum
  Clone ID: LIB3493-041-P1-M1-C2
gagatggtaggattttcttcccaaacagaatcttgggttgccaccagagactcaatctacgaatcccagaaagaggcagatagcttcgaattggatctaaaacgtctagatctgataaagatagatcaagaagacgagaataataatattaacagccatgatcagattagcaccaccaagaagaacaggaagaaaaatcatgtgttgctggaggagatcgtggaggcggttgatgaggtaggtgatccctacctggaaaggctaag

SEQ ID NO: 4163 - DNA, 207 bp, Gossypium hirsutum
  Clone ID: LIB3493-041-P1-M1-C3
gaaattaaggaatggagaccttcctatttacctcggagtctgtgaacgagggacatcccgacaagctgtgtgatcagatctctgatgcagtcctcgatgcctgtttggcacaggatcctgagagcaaggtggcttgcgagacctgcagcaagacaaacatggtgatggtgtttggtgagaacaataccatagccgtcgttgattact

SEQ ID NO: 4164 - DNA, 435 bp, Gossypium hirsutum
  Clone ID: LIB3493-041-P1-M1-C4
aaaaaaagaagaagaagaggtgctacagaaaagaagagaaaaaaagagaagggaagagaaaaagaagccatgtaaattttatgccggaaaaaatttatcactgtcctctggcgactctccaatgagttgatagcaaagtgcagctggatcggtgaatgaagatacttccgttactggacttctgtcaattggttgcccaagctgtactgcaacatctttctagtacatcgtttatcttacattctgtaaatgttttgtgatggttttcggggggtgttctctttatatatttttggtttttttattaatattctctgtctatgtttcattattttttcttttgaattgttttataatatttctcctgtctatctcctatttattttatgggctatttggcttaatattttcttttattatttttttatttttttt

SEQ ID NO: 4165 - DNA, 363 bp, Gossypium hirsutum
  Clone ID: LIB3493-041-P1-M1-C5
tcggccacgcgttcgaggaaatgaaaaactgatccatcgttgaatgctaaagaaaaattaaaataaaatctcagaaaaccctaataaggacacgtaatgagagtagtttgtttaattgggaaaaaataaaatcaaattgttatagatgaaagctcttaaacaaaagttagaatttttctttatttttgaaacttggttttattgtgtatttttctttggttggtttattttttagggttggtaattataattttttctatatttttatatatttatctttctagtttatttgattttttttctttaatttttttaataaatttttgttatttgattttccattatttttccatattttttttc

SEQ ID NO: 4166 - DNA, 69 bp, Gossypium hirsutum
  Clone ID: LIB3493-041-P1-M1-C6
cccacgcgtccgaaagaaacaacctatcttttaggttgcgtcctgtgcctgctcgctggcggatatcct

SEQ ID NO: 4167 - DNA, 272 bp, Gossypium hirsutum
  Clone ID: LIB3493-041-P1-M1-C7
ggtgtctcgattattctcttgcaatccaatttgttgaggagtaacacaggggcttaggacctaccgtgataccattggatgagtggctatacaacacaggagcgcaccctttacgaatctgtcaccggagtgatgcaaatcttgcagcattggaagggcaacatacacctgtgatcaaaatacgaagcacgataactgttcgattgggtggtcattaggatctgttttcagttttttgttccttgctgaactatgagattttaatcctttaa

SEQ ID NO: 4168 - DNA, 315 bp, Gossypium hirsutum
  Clone ID: LIB3493-041-P1-M1-C8
aaaaaaaaaaatggagggcaaagaggaggatgttaagctaggagccaagggttctctgagagacaacctattgttacatcaactcaatcatacacggactacaaggagcctccaccggcaccattggttgtgcctgtagagcttcaagtcttggtttttctacatattacggtatcgttataatatttttgctctctattctggtccttttcattgctattattgatatcttatttcatgttcttttattttattttatcctcgatttattaatcttatatttttacgtccatgttcatttttttttattgtttt

SEQ ID NO: 4169 - DNA, 425 bp, Gossypium hirsutum
  Clone ID: LIB3493-041-P1-M1-C9
ctgtccatgatttcgaaggtgaccaaacttacagcgagaagccaggtcatgattttactctaacagccaactttgaggacatagatgcctcaagttatgatgctcttgtcatccctgggggtcgggcaccagaatatttagcgatagatgggaaagtgattgatatagcgaagcattttatggagtctgagaaaccggttgcatccatttgccatggaccggaagattttagctgctgctggcgttctcaaggggaagaaatgtaccgcatacccagctgtgaaactgaacgtggtgttggccggagcaacttgtttagaacctgagcctatagatcgatgctgtactcatggaaatttggttaccgtgacagcttggtcagtacaccttgtgttcatttctcaattaatggatttgctgggtat

SEQ ID NO: 4170 - DNA, 303 bp, Gossypium hirsutum
  Clone ID: LIB3493-041-P1-M1-D1
gaaacctttggtcttgaaaatgaaacattttttcaaagacaaccatttgcgctaatgtttccaacaacaatgaatctagagatgatcacgagatgggttctagttctatgtcagcaaatggtgatattttgatccaaaacccttctttccattgcttcttacaaggcaaagatctcaaccctgctcgcgcgattatagctgagatgttggggacatttattttgatgttgtgcataagcgggatcatagcaagcgctaagcttacaggtggagatgcgttgtttgcgtatgcacttacggtgg

SEQ ID NO: 4171 - DNA, 323 bp, Gossypium hirsutum
  unsure (1)..(323): unsure at all n locations; Clone ID: LIB3493-041-P1-M1-D10
gcttcctgctgttactttcataatggccatgattttcaggttggagagaatcaatntgaagaaaatacacagtattgcaaaggtggttggaactgcaatcacagtgggcggtgcaatggtgatgacattgtataaaggcccaattattgacttcgtcaagtcaggaggagccacacaccttagcactaacactgaatctgcagatcaacactggttttctgggaccataatgcttcttggaagtatcgttggctggtcaagcttgtttattttgcaatccttcacattgaagaagtacccagcagagctgtctcttacagctt

SEQ ID NO: 4172 - DNA, 416 bp, Gossypium hirsutum
  unsure (1)..(416): unsure at all n locations; Clone ID: LIB3493-041-P1-M1-D11
ctgatgcattaatattgaatcgtctctttggacatttatttagcaatggagttatacttgttgcaacttcaaatcgtgctccagataatctctatgaaggtggattgcagagggatctttttctacccttcattgccactttgaaggaaagatgtattgttcatgaaattggttcagcagtagactaccggaaactgacctcggcagaagaaggtttctacttcattggcaaagatttgtccagcctactaaaaacgacctttcagcagttgattggtgaacatgttgctagtccacaagtggttgaagtagttatgggttagacgttgcaggttccccttggtgctaatggatgtgcttatttctcgtntgaggaactctgtgacaaaacttttggggctgcagactactttgga

SEQ ID NO: 4173 - DNA, 263 bp, Gossypium hirsutum
  Clone ID: LIB3493-041-P1-M1-D12
cggacgcgtgggcggacgcgtgggcggacgcgtgggctgtcctgagattgattaacgggtttggccgcgcaactgttggaacttgtgccctcgtgttatcaaccgagctagtaggaacggtggcgccgccaggtcggcgtttttaggtaattttggttgactattagggttgtttaataggagggtatcggattcttttattgggggaagaaagggtctacatcattttctgagatttttccaatctatataaataatatttt

SEQ ID NO: 4174 - DNA, 316 bp, Gossypium hirsutum
  Clone ID: LIB3493-041-P1-M1-D2
cccactgtaaaaaaaagagagaaatctgatcagacggtgaaaatgggtagccttgaaactgagagaacaaccacaggatgggctgccagagatccttcaggagtattgtctccttacacttacactcttaggaacactggtcctgaggatgttttcgttaaggttatgtgctgtggaatctgccacactgatcttcatcaagccaaaaatgatcttggcatgtcaaactacccaatggttcctgggcatgaagtggttggtgaggtgttagaagtggggtcagtatgtagcaagttcagagttggtgatattgttg

SEQ ID NO: 4175 - DNA, 444 bp, Gossypium hirsutum
  Clone ID: LIB3493-041-P1-M1-D3
aaccactttgtgcaagagtttaaaagaaagaacaagaaggacattagtggtaatcccagggctcttaggaggttgaggactgcttgtgaaagggcgaagagaactttatcatccactgctcaaacaaccatagaaattgactccttgtatgagggtatcgatttttactctaccattacccgtgccaggtttgaagaacttaacatggatctattcaggaagtgtattgaaccaattgagaaatggttgagggatgcttatatggacaagaacactgcccatgatggtgtcttggagggggatccttagattttaaatgtcacccattatattatattattttttggtatatatattaagttaattttttatttagcttttattacttttttaattttttatatattttttttaatattaatattattctttctttttttaaat

SEQ ID NO: 4176 - DNA, 258 bp, Gossypium hirsutum
  Clone ID: LIB3493-041-P1-M1-D4
atgacgatgcgggttctgctggtatgaggaccgttgcactccttggagctggtgtttcaggtttactaggttttgcaacagtagcatctgctgatgaggcagaacacggtttaggagttccaaattatccttggcctcacgcaggcatcctcagttcatatgaccatgcttcgattcgtcgcggtcaccaggtttaccagcaagtgtgtgcatcctgccactctatgtccctaatatcataccgtgatttggttggtg

SEQ ID NO: 4177 - DNA, 134 bp, Gossypium hirsutum
  Clone ID: LIB3493-041-P1-M1-D5
tcccggtcacccacgcgtcgtgacgcttcggcttacgcttgtatgaaaccgtgactccttgaggtggttggaggttactaggtttgcgcaaatcatctcctgatatgcatatcactgattaggagttccaaata

SEQ ID NO: 4178 - DNA, 417 bp, Gossypium hirsutum
  Clone ID: LIB3493-041-P1-M1-D6
ccagctcccaaggtaaatatgccgatcagaaacatagcggttggccggcccgaagaggcgactcaccccgatgctctcaaggcagctttggctgagttcatctcaaccttgatcttcgttttcgctggatcgggctcaggaatggcttttaacaagttgaccgacaacggagcaacaaccccggccggtctcgtagccgccgctctagctcatggcttcggtcttttcgtcgctgtctccgttggcgccaacatctcaggtggccacgtcaaccccgccgtcaccttcggtgctttcgttggcgggaacatcactctcttgcgcggcattctttactggatcgcccaactcctaggctcaaccgtcgcttgcctgttgcttaagttcgctaccggcgacctggctgtaccagctttt

SEQ ID NO: 4179 - DNA, 260 bp, Gossypium hirsutum
  Clone ID: LIB3493-041-P1-M1-D7
tccttcttctttgagattttgcttcagcactctaaagcccctgccaagccaaaatgggtatttctcgtgattccatgcacaagaagcgtgccactggtggcaaaaagaaggcttggaggaagaagagaaagtatgagcttggaaggcaacctgcaaacacaaagctatccagcaacaagacggtcaggaggattagggtccgaggtggcaatggttagtggccttccttgaggcttgacacaagaaactacccctgggga

SEQ ID NO: 4180 - DNA, 71 bp, Gossypium hirsutum
  Clone ID: LIB3493-041-P1-M1-D8
ccaattctttgggtagtggttacatgtgggaaagcactcacacggagcatcgagaggcctaaggtgaaagt

SEQ ID NO: 4181 - DNA, 137 bp, Gossypium hirsutum
  Clone ID: LIB3493-041-P1-M1-D9
caaccattaattttgatttcctttttcaagtagttttggctgcttcagattctttgatggtttgtcattggaggtttcatactccctcattttactctaggtttaactagatttgaaagcttgtttgcatctcttat

SEQ ID NO: 4182 - DNA, 443 bp, Gossypium hirsutum
  Clone ID: LIB3493-041-P1-M1-E1
cggacgcgtggggaaggacaggatgtgcttattttcattgacaacatgtggggtggtactcaagcagactctgaagggtctgccttgctaggccgtattccatctgctgtcgggtaccaaccaaccttggctactgatcttggaggtcttcaggaacgtatgaccaccaccaagaaaggttctatcacttctggtcaagccatatatgtgcctgctgatgacttgacagatccagctcctgcaacaacctttgctcacttggatgccacaactgagttgtcccgacagatctatgagcttgggatctatcctgctgtggatcctgtggattctacatctcgcatgctctctgctcatatattgggtgaggaacactacaacactgctcgtgggttcagaacgttgttcaaaactatcagaacttgcaagaatttattgctatt

SEQ ID NO: 4183 - DNA, 392 bp, Gossypium hirsutum
  Clone ID: LIB3493-041-P1-M1-E10
gccactcctacggtttcaatgcatcgataatcgcatacatcaacgacccggctagtgaatacaactgaccagcatgtcactgtgatactaatgccatggactggtatacaagtgttactgctgtgatgactcatgccaaaacagattgtactcagatgtatgaaacttgcttcgaacttgctgtgctctgcgaatgaacaatggcatagaaggtgtgctgcaagatttgcttatctggacatgtttgccaggtcggacgaattgcaagatgatacaatcgatcatgacatgttatgtccaactttgcacctgataccgtgcatattgttcttacaatgtctattctcaaagtatgcatgcctgggaagccacatgcgatttgggtgtgacag

SEQ ID NO: 4184 - DNA, 394 bp, Gossypium hirsutum
  Clone ID: LIB3493-041-P1-M1-E11
cagaggtggtagttggaatttttctagtgagaacaaggatgtactatatgctatatgttaaaaacggaccagaacggctcgattttccgatttgcatagaccaatatagaattgtcgatgctattgtgactcgtacctgaagtctgtgtagtccaatggtgccactacattacgaccggtctgtactctgcaataaacaattccgtagaaggtgtactgcaggatttgcttatctggacatttttgccaggtcggaccaattagcattgtgatacaatcaatcctgccatgttatctcccactttactcctgagtactgtgcatcttgttcttacaatgactattctcaaagagtgcttacctttgaagccacatgctattttattgttacagc

SEQ ID NO: 4185 - DNA, 344 bp, Gossypium hirsutum
  Clone ID: LIB3493-041-P1-M1-E12
ttcagaaacatgcaaattgatgatgaggagcctcttgtgaatggtgtacttgattatgaggctggagaaccaaatgggcatggtctgaattcagaggagcagaatggagaagatggtagccaagaggagcctgttgttgtagatgctgattctaacgatggtgcagtacttgttaatggttacgagccagaataagagaggggttcgaatactgaatgaaccctgtcagcctaaatgcaattgtgcttacaccagatcactaggttttatgaaaacattcagtttgagctccatttatcatgtacttaatatatcatactattagcgcgaacgatgtgaatttt

SEQ ID NO: 4186 - DNA, 220 bp, Gossypium hirsutum
  Clone ID: LIB3493-041-P1-M1-E2
cattaggtcacctaacttttctgggtcattgagacttggaccaagtgggcaacctgtgaggatcaaatacaccccgttgctcaagaaccctaggagaccctaactttattacgtcaatatgattggtattaggattggaagatggatcgttgagatccaaccaagtgccattgatatccatacttccactgttgttggcaccaatatcgattctggttcc

SEQ ID NO: 4187 - DNA, 98 bp, Gossypium hirsutum
  Clone ID: LIB3493-041-P1-M1-E3
tgatgacagaaatcgagaagcaattgcagcagctggtggtgttgaggggttggttacggtgccccaacacttttctgattctttttcatacttttatg

SEQ ID NO: 4188 - DNA, 492 bp, Gossypium hirsutum
  Clone ID: LIB3493-041-P1-M1-E4
tcttgtcgttgtaattccaacaaaacccttccaaaaccctcgtaacatggttgtgaaccgtctaatcacttcgctgcctccactaatggcgacccaagcactctctcgcgctctcctctcgaaacccaaagccctatcttacttcctcatacattgctcccactctttgtataacttttcctccttctcctgcgtcgcttactacaccaaaactcttatcaccccatcgccacccccttccctctccttcctccgtcgccttcgtgccccgccttactactcactccttcgtgactcactttccccagctgttaaatcgttctccactcgagcagccaggttctccctcaatgaccccaatcctaactactcgaaccggcccccgaaagagaccatcttgctcgacggatgtgattttgagcattggcttgttgtgatggagccgcctaaagaggatgctactatggatgatatttatgatagttatattaa

SEQ ID NO: 4189 - DNA, 168 bp, Gossypium hirsutum
  Clone ID: LIB3493-041-P1-M1-E5
gtatctttgaagttaaggccactgctggtgatacacatttgggtggtgaggatttcgataataggatggttaaccatttcgttcaagaatttaagaggaagaataagaaggatattagtgggaaccccagagcatagatgaggttgaggactgtttgtgagagagcaa

SEQ ID NO: 4190 - DNA, 424 bp, Gossypium hirsutum
  Clone ID: LIB3493-041-P1-M1-E7
cagaatatgaaaaacgctgtttgcacgtatgctgtcattgggagggccagcatctgatgtgggtgatcttgacaagaagaataatccccgtggccgcgcttacaagaggatacaatagaaccgtcgtttcgtcatcgcagtggttggttccggtaaaaagaagggacctaactcatttgagaagtaagagctatgcaattgaaaaaagttattgaatgaagctcttatggatttagtctgtgttttttccttgatttattatgtaatgtttaatgatacttttttttatacactggcattgaggatcaagtatttagaagttttgttggcaaaatattatgtgatttcgatattatgttaaacttaatttttggttctttacgtacttcttttctgaatatatcgctggcgaattattgccatt

SEQ ID NO: 4191 - DNA, 197 bp, Gossypium hirsutum
  Clone ID: LIB3493-041-P1-M1-E8
actcgataaaggcaaccgtgccttcgaatgcagatgtctataactcaccagaaagcaaccctgttccatcagctggtcggtttcggcctgatatcagtggacttatgacacagattgttgaatttctagccaagaacggtgcacctttcaccataaacatctaccctttcctcagtttttatggaaatgatgacttt

SEQ ID NO: 4192 - DNA, 104 bp, Gossypium hirsutum
  Clone ID: LIB3493-041-P1-M1-E9
gtcatggtctttggagagattaccaccaaagccaacgtagactatgagaagattgttcgtgatacatgcctactccattggatttgcctcctttttctctctta

SEQ ID NO: 4193 - DNA, 393 bp, Gossypium hirsutum
  Clone ID: LIB3493-041-P1-M1-F1
tgatgagaggatagaagtaaaaagaaagattgtaaggcagcggttgcgttggcatattgttgccatctgcatctacaactacaccgaaggcatcctcattgatactggatgcccctctagctaaggtatgattgccctgcgacatacaatctcctttgatcacattcattggtcctctaccagagcataacgcttcctatatccctccagactctattcccacataacgcgatgaaatcgtcatatcgtatccttggccaagcataatggccaatggataaccacattgagcacttggagatccattaccctgacatccattgagcatgtacccttattcaatgttccatcgcaccatctgattaacgctggtgctgattacatatcaggccc

SEQ ID NO: 4194 - DNA, 363 bp, Gossypium hirsutum
  Clone ID: LIB3493-041-P1-M1-F10
gactaatccctcaaacctcaccaatttcatcccatggaaaacttctcctactcttcttatcctgaatccggcgattcttcgcctcgttccagagaaattgaatgcgaaaatcaatcatgggacgagtcgccctccctcaatgctactaataataatgttaattataaggttaagtttatgtgcagctatgggggcaaaatccaaccgcgttcccacgataaccagctcgcttatgttggtggagataccaaaatcctggtcgttgaccgcaacatcaagttctctgctatcatggccaagttatcttctctttacggtggggattctgagggtgtttcaagtatcagcttcccggggaagatc

SEQ ID NO: 4195 - DNA, 343 bp, Gossypium hirsutum
  Clone ID: LIB3493-041-P1-M1-F11
tggaaatgcagcggcaaccatgggagccactgcccaaagtaactggaagttcaatgttttacagagtggagttcatcatgccttaaacccagatccgtaccgtggtgtctttggttctgatggagagaagtatgcaaaggatgttcaagatcttatgcagattggaacttctggcaacgttgctggattcatttctgaagctatacaaggagttggtggaatcatataattggccccaggttacttgcctgctgtttatagcaccataaagaaagctggaggtctttgcattgctgatgaggttcaggctttgtctgctcgcacagggaggcctttttgggga

SEQ ID NO: 4196 - DNA, 297 bp, Gossypium hirsutum
  Clone ID: LIB3493-041-P1-M1-F12
cggacgcgtgggttttggaagagaaaagcccgttcaccacgttctcgggggaggcaaaccggctgacattttcctttggaggaacaaaaagatatcggcaggagcgctcggtgtcgcaaccgtgatatggattttgtttgaaatgctcgaataccaccttctaacactagtgtgttatttgttgatacttgcttttgcattactcttcttgtggtcaaatgctgctacctttattaacatgtctgcaccaagcattccttaatgtttaaattcctaaagacccatttatagtttttt

SEQ ID NO: 4197 - DNA, 79 bp, Gossypium hirsutum
  Clone ID: LIB3493-041-P1-M1-F2
cctgtatattatggagttagaaattcggatcctatgcaagtttacccaggaatggtggggccggatgtgaaggaactgt

SEQ ID NO: 4198 - DNA, 145 bp, Gossypium hirsutum
  Clone ID: LIB3493-041-P1-M1-F3
ggagggtgttatcaacttctacatgatcatgcattacactcattcacagatgcttgcgggttacatctgaatcaacgggctatatcgaatacataatctactttaaaagttgccctactacatcaggaatcacagcctagcgaca

SEQ ID NO: 4199 - DNA, 428 bp, Gossypium hirsutum
  unsure (1)..(428): unsure at all n locations; Clone ID: LIB3493-041-P1-M1-F4
ccgatcaaaattgaagtgggatgaaatgcttcttagtgccgaaactctcgagtcgtctcccactgacggcaccatggtggtccagtgggttcnaaagttttcctttttttgtagtgacagagaatacttgataggtcgtcggttttggtcattttgtcggtcttatatatgtgtttcaaagtgttgtactatatttacttttttttttataaactatattaattcttgtgtgtttttattatattatttttttatattttgtaaatctttttcttaattgttatccttttttcgacttatttattttaattttgtttacattactatattatttttgattaatttttattttttttttgtatatttttttttttatatttatttcatttttataaattttttttttatattttttctaatatttttct

SEQ ID NO: 4200 - DNA, 310 bp, Gossypium hirsutum
  Clone ID: LIB3493-041-P1-M1-F5
cttaccttatctagggttagggttttgctccttctgagtctctctctcaataccaaagatatctccaaattgaagatgatgcaacaaccagcacaagctatggtaccaccaccaatggctccaccaccttctatggcgggtgctccacagacccaacaacagtaccaatatcagcaaccaccttcggctccggttccttagacacaaccaccttacatgatgatgaacatgatgcagccgcctcagagtcatcctccacctatgtggcccccacaacaaggtacggatggggtaccagcttaacaacagt

SEQ ID NO: 4201 - DNA, 171 bp, Gossypium hirsutum
  unsure (1)..(171): unsure at all n locations; Clone ID: LIB3493-041-P1-M1-F6
caggggaatctgatctggtgataccaggtgtgctaatcaaggataaaatggctgatttgaaagtgagttttactggttttggnagaattgcagcgagattctgtgagaatgatggaatctcaaatggtattagcagaatatggagtgattggcttgggaaagatgcttcta

SEQ ID NO: 4202 - DNA, 342 bp, Gossypium hirsutum
  Clone ID: LIB3493-041-P1-M1-F7
ataccaactgctgtgcttatgatcttgtggtgaaaaaggtgaattgtgatggttgctgtggttatagcatccattacaccccgcatattgctgttgccatcttcttccacctatttggtggttattgggctacgcagttttttatagcgtggactgtaatcaagtttgcgggagttattattattctctattgagcgcagcttggtacgtaaatcttgtggccctttgcctggtcattatggatgtgttatgcgacttgttcgaaaaatttgtggactctaatcttgcagttgactcaacttgctctttatgtactgtctatatttgttgtacttcacacat

SEQ ID NO: 4203 - DNA, 271 bp, Gossypium hirsutum
  Clone ID: LIB3493-041-P1-M1-F8
cttctttcctcctagccaaaaaaaaaaaaaaaaagcctctttcctttctgtcgttctttttcctgttcaatcatgtcttgcttcattagcaaatatgctgatgagttggctaaaaacgctgcttacattggaacccctggaaagggtatccttgctgctgatgaatccactggcaccatcggcaagcgtctttcaagtattaatgtagagaatgttgaagacaacaggcgtgctcttcgtgagctcctattcacaactcctggagctcttc

SEQ ID NO: 4204 - DNA, 209 bp, Gossypium hirsutum
  Clone ID: LIB3493-041-P1-M1-F9
acccttgtgcttcttgcagttgtttgtgaccttcgttaacatttaaggggagttttttttgttgcactgcattcaacttctatatataattgattactcgttacgaaatatctatggctgcttaactctaaatttcataaaagagtccactgattggtttatagatcgaccataatatactcaaaattatatgacattattttatattg

SEQ ID NO: 4205 - DNA, 118 bp, Gossypium hirsutum
  Clone ID: LIB3493-041-P1-M1-G1
ttctcaacatactgcgataaccaaccctgtgtattaatccaagtttacgagggcgtacgagcacaaacaagagatcacaacttattttgcaaattcagactctccggcatggcaccgg

SEQ ID NO: 4206 - DNA, 153 bp, Gossypium hirsutum
  unsure (1)..(153): unsure at all n locations; Clone ID: LIB3493-041-P1-M1-G10
tggaattcaatggtcaagctgagaaatctgcaaaaagaaagaggaagagccagtatcgcggaattcgccagcgtccatggggtaaatgggctgctgagatccgngatccaaggaatgggtgtttgttgttctttcttttctttttttttcttt

SEQ ID NO: 4207 - DNA, 101 bp, Gossypium hirsutum
  unsure (1)..(101): unsure at all n locations; Clone ID: LIB3493-041-P1-M1-G11
ctgagtcctttacttgatccttttttagtgcggttctagtgatctgggtgctgancatgtgtaactgatagcattcttgttttaaacagatttctgtgatc

SEQ ID NO: 4208 - DNA, 465 bp, Gossypium hirsutum
  Clone ID: LIB3493-041-P1-M1-G12
attcttccttacgccagctccgctcaacaaaaattctatcgtttttaaccaaaccctaaattaaccaatcccagtctccattttaatcaacaaaggtatttttttgaaaactatcaacactgactcagctattccatcacttgcagactcactgctccactcttaagcaagcaaatggaccgacattcatccgacgaagacgacgatcgccaaaccttaatccaccaaaacgacaccaagcaccttccacgccaaatctcaaccagcccacgcgctttcaccgctccaagatccggtttccacatcgaagagctggaatctcaaatccggcgacgtttcaagctcaccttcaacaagcgttacctcttcgccatctttctgcctttcgtcctcattcctatcttactctccaccgacattcgtttcctcttttcttccaacatttcctcccttaaattcaataag

SEQ ID NO: 4209 - DNA, 160 bp, Gossypium hirsutum
  Clone ID: LIB3493-041-P1-M1-G3
cccacgcgttcgtccacgcgtccgggatttcgaagcctccttcaacaatagataagtcggattttctccttatagatctatcttcatgcaatagataaagaatgatgaaatagaaacgaaaatcaaggaagaacatgatctatacacacttgaaaactaa

SEQ ID NO: 4210 - DNA, 173 bp, Gossypium hirsutum
  Clone ID: LIB3493-041-P1-M1-G4
gaaaaaaaaaccatttatttttcttcagctctaagcgacaagaacaatggctgacttcaagaaagccactgctttgattctcacagtggctttgcttgtgaatctcgctttaatggttgatgctgatggtgatgatgataagaagactcgtgttacgtatcatttcgattttt

SEQ ID NO: 4211 - DNA, 511 bp, Gossypium hirsutum
  Clone ID: LIB3493-041-P1-M1-G6
aaaaaaaaacattcgcagtttcaacaatggcagagtcgtcaaacaacgttgtcgagacgatcaaccttgattgtcacgattttaagtctcttctctcttcttcagacagggattttctcgttcgtaacaacggtgatcaggttaaaatctttagcttgaaggggatgatggttggatagttattatatttcatttcagtatttgtaaattcttttttattttgttcaatttctttttaagttgttttcgtttattatatctttattttgttttaatttttttccttttttttgctatttttctacttttgtatcttttttttttgtttttttaattttttttttctgtttgattgattatttttctcttttttgtataatttttaagcatgttttatcaattttttactttttttcgtgattttttttttcttttttctatttttttcttgttttttcgaatttattttgttgtttgttatcttattttttttctttgttttaatattttt

SEQ ID NO: 4212 - DNA, 336 bp, Gossypium hirsutum
  Clone ID: LIB3493-041-P1-M1-G7
gggaacccggttcaacgatgataatcccgggtcacgaacacgaaatattgtcgtgtgattggaataaatatgatgaatgcctgcttgctagttcaagtgtagataagagtattataatttgggatgtgagaaactatagggtcccggttttggtgcgctgtggacaggggtatcctgtggcgaatattcaactccacttgtatctgaggtagatggggggcccctgtggtttaccaatgaccttgacattgttgatgaaggaaacatatattttacttgatgcattagtaaattccatattaggtacttcatgctgcttgttttttcttcagagaa

SEQ ID NO: 4213 - DNA, 67 bp, Gossypium hirsutum
  Clone ID: LIB3493-041-P1-M1-G8
tcctaatcttaaatattattatacatattttacactatctaattatattgtatcataatagataaaa

SEQ ID NO: 4214 - DNA, 425 bp, Gossypium hirsutum
  Clone ID: LIB3493-041-P1-M1-G9
gaaaacttttcctgggtttggctcttgatccaacccataagtctttaggtttcaaagatatggctggaaaggagttcactgttaatctgaacaaaccccttgtcttccaggttggtcaccttggagaagcttaccaggaatgggttcatacgcctattgtgacagatgaaagtcctcgctttttcaagagtgatttcatggagatcctgactcggacagtgtggtgggtagtaccattgatatgggtgccgggtgcaatgtgggtcaacttaatcctcgtacacaatgggtcatacactttcccaagttgttttaatgtctgttgttggaggttcatttggacattcttggaatactgtttccaccgtttcctgtttcacattgaaactataagttactggtttaacactttttactatcttatt

SEQ ID NO: 4215 - DNA, 454 bp, Gossypium hirsutum
  Clone ID: LIB3493-041-P1-M1-H1
cggacgcgtgggagacaatgagaggaacattgacgttgacttggattctgatggtctgcctctcccaagtagcggtgcagagccaatactactcggagagcttaccatatgatcccaggccggttaaggtcactaatctttacttctttttgcatgaaactctccgcggtaagaacccaacagtagtcatggtagcccaagctaacaacacaagcaacgacaactactcatcagtgccatttggcaccctatatgccattgatgatcccctcaagataggtcctggggacaactcagaggtgattgggaatgctctgggacttgggatcttgtccggcaaaaattcaacgaccggggggatgtacttagattttggatttactgccgggaagtttaagggcagctctattagcatattctcaaggaaatccgtaataaagatggaacgtgagct

SEQ ID NO: 4216 - DNA, 140 bp, Gossypium hirsutum
  Clone ID: LIB3493-041-P1-M1-H10
gggtaaacaaggaaggagaagaatgggttcttatgctctgtttttgatggctctctttctatgtaaatgcttggctgttgcaatcttggacccactcgattttttagctttacagtccattatgaatgtcttcaccttta

SEQ ID NO: 4217 - DNA, 164 bp, Gossypium hirsutum
  Clone ID: LIB3493-041-P1-M1-H11
aacggagaggatacaagcgtaattagtcccactcttggcttcaacatcggaaccatcacataccagaaatatactttgaatatatgggatgtaggtggtcaaagaactataagatcgtattggaggaactattttgagcaaactgatggtttggtttgggttgt

SEQ ID NO: 4218 - DNA, 370 bp, Gossypium hirsutum
  Clone ID: LIB3493-041-P1-M1-H12
ctcgaagctcactgacctcaaaatagaggggatgcaagagctgaggcagtgacaagtgagatggttcgtttgattgaaacagctactgtgccaattttggcggtggatgttgatggcctggttaatgggtggaatatgaaaattgctgagttgactggtcttccagtcgataaggcaattggaaggcatttactcacacttcttgaagattcttcagttgaaacagtcaagaaaatgttgtccttggcattgcagggcaaggaagaaaagaacatccactttgagatcaaaactcatgggttgaggtctgaggttggccccgtcagtttagttgtcaatgcttgtgcgaaccgggatctccatgaaaatg

SEQ ID NO: 4219 - DNA, 177 bp, Gossypium hirsutum
  Clone ID: LIB3493-041-P1-M1-H2
cccacgcgtccggcagtaatggctccttcaactctcacagagcttgcagggaaggaaaccttacaggcaagctttgttcgtgatgaagatgagcgtcctaaggttgcttacaacaaattcagcgatgaaatccctgagatctctttcgccgacatctatgatgtatgtgaaaatagg

SEQ ID NO: 4220 - DNA, 188 bp, Gossypium hirsutum
  Clone ID: LIB3493-041-P1-M1-H3
cgcatgtctccctggcacgtgctcgtcatggtttctgtttggttaacgagaaaatgttggaaattgatagaattaaaataaaaaaaacatcttttaaattaactgaagatcatcggtgatttctaggatgtgcgttgagtcttgttcgatgttatttttttcattcttacttatttaacaattttttt

SEQ ID NO: 4221 - DNA, 226 bp, Gossypium hirsutum
  Clone ID: LIB3493-041-P1-M1-H5
aaaaaaaaaaaaaaaaaaaaaaaaaaaaaaaaaaaaaaaaaaataaaaaatgggaaaaggaggaaaaaagaataaaaagggaggaacataaaataaaaaaaaaaaaatataataaataaaaaaaaaaaaaattaaataaattaaaaaatgtaaaaaaaaaaaaaggggggggggtgattttagggatacatatatttaatccctttttaagaaaattattactttt

SEQ ID NO: 4222 - DNA, 260 bp, Gossypium hirsutum
  Clone ID: LIB3493-041-P1-M1-H6
ctcagtggaaatatatcaggaactgacccattgaaggacaaccgcttacttctggaagggaaagctttagatgacacagatgaagcaagacacacggctgcagttgttaatgagttatcctgggagatttcgaggatactggtgtctcacccgttgaatgcaaaaagattagcagaagggaagaacattgctaacattgtccttctaagaggctgtggtattcgaatcgaggatccttcatattaaaagatacatgactt

SEQ ID NO: 4223 - DNA, 433 bp, Gossypium hirsutum
  Clone ID: LIB3493-041-P1-M1-H7
gctggttgcagaagttgctggtgaccctcggattgatttccttatttcgatcttatctttctcttcttgtcatccatgtcgtggataatacagataggaacctcatcacgttccgctcttgcatctgattcgtagcttcggagtgaaagaagagagaccattttgtttggtttccaaactgagtctcggaccaaattcgtttaagctaatatttcatggtaacactacttaatatgcaaaataattttagtgttcatttccattagaagcaaaaaacaaaaaaaagtcttgaatgataaatctcaatgattcattgggctgcattgattggttgtattcatgggttggtgatgattaggtgatggtgatattcagtccattgtgtcagatggttctaatgttattcagaagtatgttctatgcatctcgctga

SEQ ID NO: 4224 - DNA, 246 bp, Gossypium hirsutum
  Clone ID: LIB3493-041-P1-M1-H8
gtaaatacattcattcccattagtacttccttaccaatcttgttcttcttctttcttctccaacatttattgcctttgaacttccaagaaatggcaaaaatcgttgttgcattagccatcttacttggattctgctctcttgctagcaccgtgcttgccttcacggcttctggctggactaaagctcatgccacattttatggaggcggcgatgctttgggaactatggggggagcttgtgtgttt

SEQ ID NO: 4225 - DNA, 435 bp, Gossypium hirsutum
  Clone ID: LIB3493-028-P1-M1-A1
ctctgttgactatggaaagaagtcgagagcttggtgtcactgtctatccttcacctcaggtttctacatcagttgtagagccttacaacagtgtgctgtccactcattcgctccttgagcacactgatgtcgctgttcttctggataacgaagcaatatatgacatctgcaggcgttctttggacattgaacgacccacttataccaatcttaaccgccttgtctctcaggttatctcatctcttaccgcatctttgaggtttgatggagccctgaatgtggatgtgactgagttccagactaacctggtcccatatcccaggatccactttatgctttcttcttatgcccctgtcatttcagctgagaaggcttaccatgagcagctatcggtggctgagataaccaacagtgcttttgaaccctcttcaatga

SEQ ID NO: 4226 - DNA, 475 bp, Gossypium hirsutum
  Clone ID: LIB3493-028-P1-M1-A10
gcctatttgaggccctcgattgtgttcgaattcctgtcagggatccaaaaggtccatataggatgcctgtaattgacaaatttaaagacatgggaactgttgttatgggaaaggtagaatctggaagcatatgtgagggtgattccttattagttatgccaaacaaggctccagtgaaagttttagctgtatactgtgatgaggataaggttaggcgtgctggacctggtgaaaatctacgggttaggttatctgggattgaagaggaggacatatcgtcaggttttgtcttgtcaagtgttgtaaaaccgatacctgcagtcactgaatttacagcccagctgcagatccttgaattacttgagaatgctatttttacagctggctataaggctgtcttgcacattcattctgttgttgaggaatgcgagatagttgagctactacagcaaattgatccaaaaacaaagaaacc

SEQ ID NO: 4227 - DNA, 388 bp, Gossypium hirsutum
  unsure (1)..(388): unsure at all n locations; Clone ID: LIB3493-028-P1-M1-A11
gaaatgccttgtttagccggtggtgncgtccggctaccggtgaagtaaagggaattttgatcattatacacgggctgaatgagcacagtggaagatatgctcaatttgcaaagcaactaatctcttgcaactttggtgtatatgcaatggactggataggtcatggtggcagtgatggattgcatggatatgttccttcacttgatcatgttgttgcagacactggggctttcttggaaaagatcaaatcagagaacccaggtggtccttgctttctttttggtcactctaccggtggagctgtggttttgaagggaacttatccattcttttatttaaatgaatagcttgagggagtttgttctgacttataaaaatttattttttt

SEQ ID NO: 4228 - DNA, 463 bp, Gossypium hirsutum
  Clone ID: LIB3493-028-P1-M1-A12
aatctctacttgggtttcttccagatggtgaccaagagttttacctctgaattccctcatgttgagaggtacttttggaccttggttaatcagccaaaaatcaagaggattcttggtgaagtgaagcaggcagtctctctaccacctgttccttcaaagaagcctgctgcccagccaaaagaaactaaaccaaaggctgaaccaaagaaagaagccaaaaaggaggttgagaaacaggcagcaaaggcagaggccgctgtggaggaggaggcaccaaagcccaaaccaaagaatcctcttgatttgctgcctccaagtaagatggtactggatgactggaaaaggctttactctaacacaaagaccaatttccgagaggttgcgattaaaggattctgggacatgtatgatcccgagggatactcactgtggttttgtgactacaagtacaatgaggagaata

SEQ ID NO: 4229 - DNA, 260 bp, Gossypium hirsutum
  unsure (1)..(260): unsure at all n locations; Clone ID: LIB3493-028-P1-M1-A2
tcggactcgtgggctgtggttgaagaaagctctcgtaacatttgagagccaagcaaagttcanattangatttagggttttttgttttcttttctttttgtgaaaggcaaaatggatctggatatgaacgtgaactcccctcactcaatgggcacaacaatcatcggagtcacctacaatggtggtgtcgtcctcggtaccgactctcgtaccaacacccggatgtatgttgctaatcgggcatttaacaaaattacaca

SEQ ID NO: 4230 - DNA, 398 bp, Gossypium hirsutum
  Clone ID: LIB3493-028-P1-M1-A3
aatgccctcaacctgacctcactttagggctcaagcgccacactgacccaggcaccatcacactcttgcttcaagaccaagttggtgggcttcaggccacccgggacaatggcaagacgtggatcactgtccaacctgtggaaggagcctttgtggtcaaccttggagaccatggccattatctgagcaatgggaggttcaagaatgctgatcaccaagcagtggtgaactcaaactgcagcagattgtcaatagccacattccaaaatccagcacccgatgccacagtgtatcccttgaagatcagagagggagagaaaccaatccttgaggagcccatcacatttgctgagatgtataggaggaagattaacaaagattttgagcttgccaggctt

SEQ ID NO: 4231 - DNA, 328 bp, Gossypium hirsutum
  Clone ID: LIB3493-028-P1-M1-A4
tcaatcctcaatctatttccatttttaaagaaactgtttaatatcatagaagaaaaaaaaaactcttgaaaaatgatgatggttgcttgttaccatccaaaatcttgccttgaatcaaactctacattgacaccaaatctttatatcttattattgcattaagttttttcaaagaaactctttttgagatattgttcttcactataaatccttttccccattaaataaaacacactaacttaaataccctaatcattttttcttttcacttttctcttccatctccaataccccacttttctcatcatctttctccctttattataca

SEQ ID NO: 4232 - DNA, 243 bp, Gossypium hirsutum
  unsure (1)..(243): unsure at all n locations; Clone ID: LIB3493-028-P1-M1-A5
tctgaaaatacagagaaatcanctttctgaccttgtcaaacttcccaaaaaataccnttttcatcttaccaagttccagaaattttcaacaagttttcagtgaaacctggatcactgaaggcagagatgatgaataactacttttaangagtgcaaacaaccaactattgaaggagaggaaaaatattgttcaacctcactttattcaatgattcactatagcatttccaaactacggaaatt

SEQ ID NO: 4233 - DNA, 467 bp, Gossypium hirsutum
  unsure (1)..(467): unsure at all n locations; Clone ID: LIB3493-028-P1-M1-A6
ctttcaagtggcctcagagccnanatgggtgcctggtacagcaatatcccccacagagaactcagcattgagaaggctattcagaattggattcaattagagggtaatcgttttagattccctgggggaggtaccatgttccctcggggagctgatgcatatatcgatgatattggccggctcattcctcttactgatggaactattagaacagcaattgatactggctgtggggttgcaagttttggtgcttacctcttgaataggaatatcttgacaatgtcttttgctccaagagatacgcacgaagcacaggtccagtttgcgctggaacgtggagttccagcaatgattggaattatggggtcacagaggcttccataccccgctagggcttttgacttggctcattgttctcgctgcttgatcccttggcaaaaatatgatggtttgtacctcgctgaaat

SEQ ID NO: 4234 - DNA, 120 bp, Gossypium hirsutum
  unsure (1)..(120): unsure at all n locations; Clone ID: LIB3493-028-P1-M1-A8
ctcagtcaaacattttgctcagctacgttaaatttcctatatatcccttcactctngcatgttacaacaataaatgttgactctctacacacgtttcaaataagctcatgagagaattct

SEQ ID NO: 4235 - DNA, 246 bp, Gossypium hirsutum
  Clone ID: LIB3493-028-P1-M1-A9
gtcctgcccaccctcaaaacggctcaggcggaagtagggtacagcgaacgaacaaccaccgtacgtcacatgatgtccggtcccacggctgtttgtctggataatctgggagccggtgtgccgcttcatactatttgtactcataaacgcataaaggctgctaggataacagcctctggtcaatggaacaatggccgcaagggaagtcagcataatggatccaaaacctacgaaaaaggatttgct

SEQ ID NO: 4236 - DNA, 478 bp, Gossypium hirsutum
  unsure (1)..(478): unsure at all n locations; Clone ID: LIB3493-028-P1-M1-B1
aaacagaacaaaaaagcaaagaaaagatgctcccgctcccactaaagttggtaagacaagccattacacatcaccctctccttctctcccaaactactcaccaccgtcgccgccgcagtcgccgtcacgatcaccaccaccgtgatcttgatgaagaagaagatgatgatagtgaaaatgatgcttgcaattccaaacccagctcttacaatttttatcatcattcctcaaaaccaacgaaacccaaatccaaaaccccatttcttttttttcttcctactagagaactcatcggtgatacatacaggttggccaacatagctagagaaatgggtatggatttgtaccctactccttccctttctcacatcattttctctttctcttcttcctctccttctccttcctcttcttcctctatttcttctgcttcttcttcatctgcttcttcttctgctttgnctctatcttcttcttt

SEQ ID NO: 4237 - DNA, 449 bp, Gossypium hirsutum
  Clone ID: LIB3493-028-P1-M1-B10
aatgccttcaagaatttgatggaagagggctaaacttagtcttgttgggtgccggaaaggaatccgtctccatggatttctccaactcatttaccttcacagctttgcttctgctcatctccctaatctccttcaagttcttgtctgcaaaattgaggcaaaaacagagaaagattaagtaccaccccgttgccggcacgtttgttaaccagctcctcaacttcaaaagattgcatcattatatgactgatcttgcagccaagtatcggacctacaggctgctttctcctttcaggaatgagatttatacctcggatcctgccaacgttgagtatatactcaaaaccaacttccacaattatggcaagggtgaatataatcacaacttgctaagggatttacttggtgaggggattttcacagtggatggggataaatggcgtcaacag

SEQ ID NO: 4238 - DNA, 434 bp, Gossypium hirsutum
  Clone ID: LIB3493-028-P1-M1-B11
cgttactgagaaacctgaagagatgtggtcaccgcagacaccctctaatcaagaaactcgtaatgaatcactcgatcacaacaaaggctcaaactatgtcaaatttgtgaatggagtggctgttgttcgaggaagaacccgtagtctggttgagagatttgaacgaagagacttattaaactgcagtggtgatctggcaactgacagtatagctcctgctgtacctgaagcagataaaacaccggccataatcgaaggagggacaaaaatatctaaaacacaatctatatcagccaatgatgtaagtactgccgaaagtcaaagttctagaactgaaccagcttctagctgcgagggaagcattactgctagtccgattcctacaagggaatcgacgcctacttccgttgggatcattcctggaaatcaaattt

SEQ ID NO: 4239 - DNA, 475 bp, Gossypium hirsutum
  Clone ID: LIB3493-028-P1-M1-B12
gctctttgtgccgaggctgggggggtggttgaagatgatggcaccacttatcgaaagggatgtaagccacctccgattgatatagcaggcagttcagctaaaattaccccatattcttcccaaaatcctagtcccttatcttctgcatttccaagtccaattccttcatgtcaagtcagtccttcctcctcttccttccccagtcccactaggactgatgcaaataatccatctagtctccttccgttcctcagaagcgccattccttcgtctctgcctcctctcagaatctctaatagtgcccccgtgacaccaccactttcttctccaacctccagaaatcctaagcccattcccaactgggaggcccttgccaaagagtccatggcctcttttaactaccctttttatgctgtctctgcaccagctagtccaacccatcgtcatttccatgcccctgctactataccccaat

SEQ ID NO: 4240 - DNA, 293 bp, Gossypium hirsutum
  Clone ID: LIB3493-028-P1-M1-B2
gaagcagagagcctacgcttaaatctcaggcaatgacattcaagcgtaggaatggtggccgcaacaagcacggccgtggccacgtcaagttcatccgctgctctaactgtggaaaatgctgtcccaaggataagtctatcaagagatttcttgtgaggaacattgtggagcaagctgctgtcagagatgtccaggaagcttgcgtctatgacacctacactctgcctaagctgtacgtgaagatgcaatactgtgtttcgtgtgcgatccactctcatgttgtgagggtacta

SEQ ID NO: 4241 - DNA, 361 bp, Gossypium hirsutum
  unsure (1)..(361): unsure at all n locations; Clone ID: LIB3493-028-P1-M1-B3
ctgcctcatccgagttgccaccaccaccgcttcgttgggcttggtgcactcaatcaattccntaccttccgttggaacttgacttctaacgctgctaggcctaaccctcaaggctcctacaaatatggttccattaacattacccgcaccatcaagcttgccaacactgcacaaagagtagatggcaagctccgatatgctcttaatggagccttctatgtcgaatcaaccactccactaaaacttgcataatactacggtgtagccgacaaggtttttaagtattattccatttctcctattaactcaccaagttaacaacatcttttatgtaacttttttgctctctattttttccttt

SEQ ID NO: 4242 - DNA, 255 bp, Gossypium hirsutum
  unsure (1)..(255): unsure at all n locations; Clone ID: LIB3493-028-P1-M1-B4
gcgagaagtgagaaactattgtaaaccggtcatgatattctgagctttttttttctttttgtttcgtataattttgatctgagccaaggttgataatcgagtttttataagaggttgatcctggcattccaaaattttaattgtgtggctgaatgatctatggagactaagggagggagaaagaagtctantattaattagtcattattttactaatctcctttttggtacagcattgaagactatattacaaaa

SEQ ID NO: 4243 - DNA, 139 bp, Gossypium hirsutum
  Clone ID: LIB3493-028-P1-M1-B5
tggtgaacgaaataccgcacttatgacgcatcgatactaattcgatacaccttgcttccatacttctacacattattcagagaagcaaatgttagtggtgttcctgttgtacggtcattagggatggagtttttttttt

SEQ ID NO: 4244 - DNA, 321 bp, Gossypium hirsutum
  Clone ID: LIB3493-028-P1-M1-B7
gcgatcagcccactgtgttcgtccccgcatcacaagcgccagcatcaaattggcgcaagacctagtggcccaaaccacgaatacccccgccgttgcgtacctcatcacaccgatcccctgcggcatgaaaagcgacaccgccgataatatcaccaccggcaacatacagtaaccaaccacgctcgtacacgtgtgcagatctaggttgccgttgttgcgacccgccaacatgttaaaaaccacgtataggaaaatttacgataccaccatccaccccaacaatatcccgaactggatcttgccctcttgagctgcaataat

SEQ ID NO: 4245 - DNA, 438 bp, Gossypium hirsutum
  Clone ID: LIB3493-028-P1-M1-B8
ctttcttcccccctccccctgggacaggaccctaaccctacctcaccaatcaggtattcccccttgcccttccttgctattcatcattttcctacaactttttcggcttcctgtcgattttagtggctttttcctgatctgcgatcttaattgcaggatacaacatgaagggaggtaaatccaagtcagatactaagggctctaggctcgccgtgaacaagaaatctagcgccaaagctggaaagaaatcggggaaggcggctaaggatccaaacaagccaaagaggcctgctagtgccttcttcgttttcatggaggagttccgtgagcaatacaagaaggaacacccaaaaaacaaatctgtccctgctgtgggcaaagctggtggagataaatggaagagcttgtctgatgctgaaaaagcaccttatatagcaa

SEQ ID NO: 4246 - DNA, 449 bp, Gossypium hirsutum
  unsure (1)..(449): unsure at all n locations; Clone ID: LIB3493-028-P1-M1-B9
gttacagtacaatgtcttcatgctatgagtatcnaggttatggagcaagtgatggttatccttctcagcatggaattattaacgatgctcaggctgccctggatcatctctcccagaggacggatattgacacagatagaatagtggtctttggaagatcacttgggggtgctgttggatcagtactcaccaaaaacaatcctgataaggttgctgcattgatattagaaaacactttcacatctattctggacatggctggagttttattgcctttcctgaagtggtttattggaggcccgggtaccaaaggtcccaaaattcttaattttcttgtccgttcgccatggagtaccatagacatcattgggcaggtcaagcagcctatcctttttctttctggattgcaagacgaaatggttccgccatcccatatgcaaatgctttat

SEQ ID NO: 4247 - DNA, 153 bp, Gossypium hirsutum
  unsure (1)..(153): unsure at all n locations; Clone ID: LIB3493-028-P1-M1-C1
ggacggtggtcatggaagtcnaattccggctaacgantgtataacaactcaggtgccnaatcaactanccccnaaaatggatggcgcttaagcgcgcgacctatacccggccgtcggggcaagggccaggcccctattagtatgagggcgcgg

SEQ ID NO: 4248 - DNA, 290 bp, Gossypium hirsutum
  Clone ID: LIB3493-028-P1-M1-C10
gtcagagttgtccatggtaacgccttggcggctgctgagattctaaactaaattcccaaggacgtggaaaaagtgtttttaacaagagctacttccaagctcggcagagcgtgggccctttacctttgttttatgagagtacgcgtccttatgttgactttatcaaccgagaggtttcaaaaaatacaaagggaagcccctgcggattgccagaattacctttttcaggtcaccaagtaccaggctgcttaaaattgtaagacatggatcttgggcaagttcataacacc

SEQ ID NO: 4249 - DNA, 366 bp, Gossypium hirsutum
  Clone ID: LIB3493-028-P1-M1-C11
gactggcatttggtctcttctatgcctaaaaaaaaaaaaaaaaaaaaacttttcgtataatgtgagattaaatttcttgttttgaagtttgggttttgatcagtttttagctctcttgattgggtagttttctgttttttctttgtgtagaaaaaaaaaccaaaaaaagtctctttttttttactatcaagagagatgaaggtgactgcgacggctgtgacggttgattccggttttggggaccaccaagtgtggccaccggggtttcggtttcacccaactgatgaagagcctgttctttattatctaaagaggaagatctgttaaaaaaggctttagcttgatatttttaaggaaactgatgtt

SEQ ID NO: 4250 - DNA, 356 bp, Gossypium hirsutum
  unsure (1)..(356): unsure at all n locations; Clone ID: LIB3493-028-P1-M1-C12
ataatctcgaagcttccttttgcnttggagatctcaaagagtcaaaaggctctctttttcatctcatggctgctactattgtctccgtcaaagctaggcagatcttcgacagccgtggaaatcctactgttgaggttgatgtggaaacatcgaacggtataaaggctagggccgcagttcctagcggtgcatccactggaatttacgaggctcttgagttgagagatggaagttcccattacctctcgtaaggtgtatcgaacgctgtttcttatgttaacacaatcatccgcccttcatagattggaaaggacccaacctctcacactgcatttgacaatctacatggttcaaca

SEQ ID NO: 4251 - DNA, 239 bp, Gossypium hirsutum
  unsure (1)..(239): unsure at all n locations; Clone ID: LIB3493-028-P1-M1-C2
ttcacatctcaaaggcctanaccctgcgtcctcgttcaaatcgtgagatggcgacaacatcancanctacattctcgatcggatcgactgtctcctttggaagaagggggagtccacctcctctaacaaaaccttcttttgcaaggtgcacctcacagaattcacttgcaagtttcaatggcctcaaggcaacaacatccctgaactgttattcttagtcctccttccttggcaaagaa

SEQ ID NO: 4252 - DNA, 413 bp, Gossypium hirsutum
  unsure (1)..(413): unsure at all n locations; Clone ID: LIB3493-028-P1-M1-C3
gatgaactcaaatctgaaattcttgcagattgggagtgacctctaaatgtcgtanatataagcccctatctgtgaattatctatactatccaacttgcacttctttattattgctgaatcaccctcaatgataactgatgtctattgcatgttaataccgagtcgaactgctgtgcgacatgtgagagcctcagcagcaaaagccgatgcaactcactcgtgatctccgagcacgaaaccagaaccctgcccttactgttcctggctactaatccccttgacaattgccgagatctttcatcaaaagctgcatcgaagttgatcttcacaacctttacagttttgttggtcttcttgtgaatccttttatttctgtcaccccaaattgcccataattacacaatataccacct

SEQ ID NO: 4253 - DNA, 148 bp, Gossypium hirsutum
  unsure (1)..(148): unsure at all n locations; Clone ID: LIB3493-028-P1-M1-C5
gcaaggggggatactattcaccattaagggattgctttacttgagacttgggtttggtcaccaacttcncnnttccannggatatcttgatggtgaaggttaanttaaccttcaccggggggggggagcatttttttttttttttttt

SEQ ID NO: 4254 - DNA, 424 bp, Gossypium hirsutum
  unsure (1)..(424): unsure at all n locations; Clone ID: LIB3493-028-P1-M1-C6
gccaaaccccacttcgagaattcattcgccgatgcgaacaaggacttgaacaatgcctanaagactaaagaaaagaagatttcaactcgttcaatctccaatccttttcgcaaacgaaagaagcaatagaagaacaatgccgacgactctacacattcaccatcttcaaaatatttcaagacgagctcttacaatcttacagttacatcgggataaaaacctatgaagaaggaacgatatgccggtacttagttagacggtctgggaatgaaaatgacaagcacgccgtcacattcagtgcggtcaacctcagcgttaattgtagctgtcaaatgttcgaattcgaaggcgtattatgcagacatgtcttgaaagtgttcaaattgttgaacatacgagaactcccgtctcaatatatcttacc

SEQ ID NO: 4255 - DNA, 201 bp, Gossypium hirsutum
  unsure (1)..(201): unsure at all n locations; Clone ID: LIB3493-028-P1-M1-C7
ccgggaccgtcantcttccgaggcaccgtcttttctagaaaaagggaaagctcaaganagaagaccatggccgatcaacttacggacgatcagatctctgagttcaaggaggcttgcggcctctttgacatttatttctatggtcgcattactaccaacgagctggggactgtgatgcggtcacttcgacctaactctact

SEQ ID NO: 4256 - DNA, 223 bp, Gossypium hirsutum
  unsure (1)..(223): unsure at all n locations; Clone ID: LIB3493-028-P1-M1-C8
tgaagaaacctatttntatataganccggtttaattaagcgcaagaaactacattanctacnccnccttaaggatgaatgctgttccatgcaatcaaccaggtcgatcctactataattgtggcattttttttttttctaatccatacactaaacaatacatcgtcttaacccttttccgtctattcatattttaaaattaatcaatttttatttatttctca

SEQ ID NO: 4257 - DNA, 169 bp, Gossypium hirsutum
  Clone ID: LIB3493-028-P1-M1-C9
ctccaattccgtccccacctcttttctcacctattcgcagttttttaataaaaaattaaattttaataaaaaaatctacctctcattcctcaacatccattccttcttttcctttttctcctaataagttctttatcttctagacatctaaggaaatttatttatatta

SEQ ID NO: 4258 - DNA, 473 bp, Gossypium hirsutum
  Clone ID: LIB3493-028-P1-M1-D1
ctactttcgcttcattaagcctttacgtgagagggggaacaacaaaataatctcttgcgttcttccttagtttccacttccacatatctatccataaattgaagaaaatgacctcatcatcaagtgccatgcaaatgcaatccctccttttagcaagtcccatgactggccttgctagtaagagacaaatggttcagttttataacgtgaaacccatgcctcgttttcaaaggaaactcaatcttcaagttcgctgtttggcagaggacggtgatcaaaaggagccaatgccagcagcaacaacgccggaacctaagcagagccctccacggatatcacccaaagtgagcacgaaattctccgatgtgtttgcctttagtgggcctgcaccggagaggatcaacggcaggttggcgatggttgggtttgtggcagcgctggcaatggagttatccaatggtcaaaatgtgttg

SEQ ID NO: 4259 - DNA, 353 bp, Gossypium hirsutum
  Clone ID: LIB3493-028-P1-M1-D10
cggacgcgtgggctcggagaggcaaatggacacggccgtcgagatagattctgtggtttcactttcggcttcgtcttctagaagaagaaacgatgtattgagggtctcggatgtcgacagcggtgactctcgggcgcataggaggagacgattgaactaggaaactagaaaaaggatttcacaatgtcatggacctgcttcaataaatagttctttttaattgcatcccatttatattgctttttttttttcatatataaagaattttcagctccaaatatattattcccaaacataatatggattgaaatgttatcttcctttttcctatgaatcactccatttttctgtgc

SEQ ID NO: 4260 - DNA, 459 bp, Gossypium hirsutum
  Clone ID: LIB3493-028-P1-M1-D11
aagaaatcaagaaacaaaatggagaagagagaaaaagaaaaaaagaaagaagccctttctttctctcttttggttactcaattttccgtagtattcttttgcatggcagtgaggttattgtcacatgagttatctgacttgtgtcttggcaagccagcgctgaggtcactttcagtaacatccaccattgctgaggctcttgaggtcttgaaaacctcggatgataacttcgttagtgtgtggagttgcgatcataaggctaaaaccagttcagggtttgagtcggctgctggtttttgcgataattatgatgatgatgattgtagatgtgtaggcaaagtttgtatggttgatgtgatttgttatctttgcaaagatgaaaacttggtgtcaccttctgttgctttgaaggagcctgtttcagtgcttttgcctaagattcctggccttgttttgcat

SEQ ID NO: 4261 - DNA, 475 bp, Gossypium hirsutum
  Clone ID: LIB3493-028-P1-M1-D12
atcacccctaaatgaccatcagagctgatggcaactcacacaatactcacaatgtttgctcttctaatggcagcacacttcaaatcaatatcttcaacaaaccttccaccaaaggacgaccaagatctccgtctcgccatggaagagatgcaaaaagccaattacttcacctttgtaatgttgctcaacatgttgcccctcgacccaaagttccttgctaacgtaacttttttaatgcccaatgatcggatgttgtcaaaaacggtaataccagagaacgcggtttccaacttcttgcatcgtcattcaatcccttcaccgttaattttcgagcatattttatatatcccgacgggttcgattcttcccagtttaatgccagagtacttgatgaatgtctcgaatggcggtggtcgaagaagtttcgtcctcaataatgttaaaatcattagcccgaatatatgtactatcggat

SEQ ID NO: 4262 - DNA, 275 bp, Gossypium hirsutum
  Clone ID: LIB3493-028-P1-M1-D2
gctggccactgttttttttttcttcctgattatggtaccttcatacaagattatgtttcttttcttctttttttagtatttcagtcaaattgatgtttgcttaaactcttgtctaatttcaaaattttcctgctttttattttttggtttctcatactttgcctgattttccattattttcgaattttttttttttgatactaaatcatttcttaaagggatctacataaacttactttctgctttcccccccttttttttagaattcggaattt

SEQ ID NO: 4263 - DNA, 257 bp, Gossypium hirsutum
  Clone ID: LIB3493-028-P1-M1-D3
tttattttggcactacgactgtggctggcctttgtatttgtgtttggattagggagttcaaggagaaaaacaaggtggacaaggtggttgtactctggactgcaaacactgagaggtacaggaatgtcgttgttttgttaaacgacaccatggagaaccaattggcttcttttgagaagaatgagtcagagaatttacctttcacctttcacaggttcacattgagtttttgaagatgttcttttactataatgtga

SEQ ID NO: 4264 - DNA, 424 bp, Gossypium hirsutum
  Clone ID: LIB3493-028-P1-M1-D5
ccaagacaaggaaggcatccccccagagcagcggcgtctcatcttcgccggaaaacaactcgaagacggccgtaccttggccgactacaacatccagaaggagtcaacgctccaccttgtccttcgtttgcgtggcgggatgcaaatcttcgttaagacgcttactggaaagacgatcactctcgaggtcgagagctctgacacgatcgacaacgtgaaagccaaaatccaagacaaggaaggcatcccgccagaccagcaacgtctcatcttcgccggaaagcaactcgaggacgggcggactttagccgattacaatatccagaaggaatcgactcttcatctggtcctgcgtcttcgaggtgggatgcagatcttcgtcaagactttgaccggtaagacgattactttaaaagtggagagc

SEQ ID NO: 4265 - DNA, 424 bp, Gossypium hirsutum
  Clone ID: LIB3493-028-P1-M1-D6
gtccctttgtttctccctcaaccgttcgcaaagtgccttcattcaaactccaatcaacctccatgaacatcgatcggttcattcaagccttgaagggtgttttttagcctcaagatccccttaaacttcaatttcaacgaagcaagagtgaaccgatggccaaatcacaagtctttgaagaaccatttcagcattgatcttccttcaacttcaattccaacgaagcaaagagaagatccttggcgtactcgcacgcttctatgggagcacgggactactgtacgatggagaaggccatgcaggtctggcatgttccagaaactcctagtgctgctgggaattttgggtgtattgggcctcgagttttatggcttatgggtattggatctcaatgtttaataaaggggcattggatttatttttg

SEQ ID NO: 4266 - DNA, 391 bp, Gossypium hirsutum
  unsure (1)..(391): unsure at all n locations; Clone ID: LIB3493-028-P1-M1-D7
caggagaatcccaaccggtgaacttggggcaggtaatccagctaggtttgttcnacctctaacccatgaagaaaccttagaaatccctaaactcgcggtagcaatcaatgacctgagcaaagaacatttctcggagttccttccatactcaacagtatatttggaagttgagaagctcaagaagtccctgggaataaatatttgattgccttttgattttcatgtttcaatagatgagttttttcgatgcaacgaaataagcagtctcataaacacgtcgaagaaccctttttctttttgtttatccatgtattcgatcgtgttggctgtcggaaaaagagaaaaccctaaacttgtgagttccaatgaaatggaacatggtttgcaaccg

SEQ ID NO: 4267 - DNA, 519 bp, Gossypium hirsutum
  Clone ID: LIB3493-028-P1-M1-D8
caagtttctgtttggccaaagagaaagtgttaatgatggtgggaaaagatcaagatctgggtttaagtctaagcttgagttattctcaaaatcatcattcgcttcagttaaatctaggcccatctctcgttccatcttctgctaatcaatgctactctccttctgatccaaacatggaatctttacgggtagagactagatcatttcttaaagggatcgacgttaacaggctgccatccacggtcgattgtgaagaagaagccggagtttcatctccgaacagcaccatatcgagtagcctgagtgggaaaaggagcgaaagagaaggtaataacaatggcgacgagctcgagatcgaaagagcttcttctcatggcatcagtgacgaagaagacggtgatacttcgaggaaaaaacttagactttctaaagatcaatctgcaatcctcgaaaaatgttttaaaaaacacaacactcttaacccaaagcaaaaagttggttttggctaaaccactgggg

SEQ ID NO: 4268 - DNA, 444 bp, Gossypium hirsutum
  Clone ID: LIB3493-028-P1-M1-D9
cggacgcgtggggttttgctggattcgccattcggaaaaaaaaagaacagaaagttctctctgttgatcaaagttcacgtaaaagagacttgtcaactagctgatggacgttgaacagtactttgaagatactgaagcttatgaccctccaagtacagaagggaaaagatccttggacaagtgggagaattcaccaggtccgttcacaggttccgatgatgatccctctgctggttttgactgcaacatctgcctagactcggtgcaggatccggtggttactctatgcggtcacctctattgttggccctgcatttacaaatggcttcattgtccgaccatctccactgataacctagaccagaaacagcagcaatgccctgtgtgcaaagctgaactttcaaataccacactgattcctctttatggcagaggccaaacaac

SEQ ID NO: 4269 - DNA, 192 bp, Gossypium hirsutum
  unsure (1)..(192): unsure at all n locations; Clone ID: LIB3493-028-P1-M1-E1
ctctatttatgatgttgtagtcagacgctttgcatgctgatgagctagacaaaagcctanatgttctggaccagatgatgaagtattccatcggtgttactcctgcattgcaggagttcgtgcgtggagcttttgggaaagttgggaggaatgaagaacttgatagagttttaaatgaaaataggtggaggt

SEQ ID NO: 4270 - DNA, 427 bp, Gossypium hirsutum
  Clone ID: LIB3493-028-P1-M1-E10
tttccctccattcatggtcctgattagtgctatccttaatgatggcaccattatgacaatatccaaggatagagtgaaaccatctccactgccagacagttggaagttagcagaaatctttgcaactggaatcattcttggtggttacttagccatgatgactgtcattttcttttgggcagcatacaagacagacttcttccctagaacatttggggttaaaagccttcagaaaaccgaccgcaaggacataaaaatgcttgcttcggcagtatacctgcaagtgagcattatcagtcaagctctcatatttgtaacacgagcaaggagttggtctttcctcgagcgttccggtcttttactggttttggcttttgtcgtaactcacatggatgctacattaattgctgtatatgcaaactggggt

SEQ ID NO: 4271 - DNA, 54 bp, Gossypium hirsutum
  Clone ID: LIB3493-028-P1-M1-E11
cggacgcgtgggttctgagggagggggggacccatctgagagtgggttggagtt

SEQ ID NO: 4272 - DNA, 478 bp, Gossypium hirsutum
  Clone ID: LIB3493-028-P1-M1-E12
ggataatgccttttttttcggggtatggatatatctctatgtatatatgtcaatggttatctctatctatagctgttttagccgatgaaatatctaataacaaaactgagaacataagatcaaaaaaaaaggtgtatttaatatgacatgacgtattggaaggacacagataaaattgtttccacgagtttatcgaaaggtactatcaactgcactgaccttggagaaaattgaatatcagaagctattttcttgagaaaagctaaaggcgatgtatatggcggatgctaataatgaggctaacaaggatggagggtcgaatcatattgctgcacacacatttactattcgtgaattggcagctgcaacaaagaatttccgggctgattacattttgggtgaaggaggttctatgtcgattgtataaaggacgattgggttatcacttaattaaatttgtgggttatgaaaattattt

SEQ ID NO: 4273 - DNA, 94 bp, Gossypium hirsutum
  unsure (1)..(94): unsure at all n locations; Clone ID: LIB3493-028-P1-M1-E4
gatttcccaatttctaccaacatctgaggggggggtgcaattgggaggggggcagggaccttnaccaaatgctcgcgttgtatcaatgatgggg

SEQ ID NO: 4274 - DNA, 554 bp, Gossypium hirsutum
  unsure (1)..(554): unsure at all n locations; Clone ID: LIB3493-028-P1-M1-E5
actcactatagnggaaagctggtagggcctggaggtgaccggtcaccgaatttcccgggtccgaccccacgccgtcccgnngaaatggcgttgccagntggatgaatccctagacctacgggtggtctcagcgagaaggcgtgccctnnncnntcttctcttgnnaccttcccctctcnnccaagttnnattgaagaacccgnntttcgtctcttctcatgctcgcctcaattcttcaagcccacnncctctttatnntatcccctttgcccggattcccagctcttaggttttnctctctattcatttttnttttccctttnntcaatcttcaatgaaatgggttttaggtgttctcagttttttgggtgccagatattctactggaagaaccgaacattccattgatgtgctacctctgagatctgcactgctgccgagagagatcgttataagaaattcgtgttcaaagctcaaaggaatgtaattttttgtacaactgcatgcctcctttactggtgaatctaccgtatttgccagtattacatggaaat

SEQ ID NO: 4275 - DNA, 164 bp, Gossypium hirsutum
  unsure (1)..(164): unsure at all n locations; Clone ID: LIB3493-028-P1-M1-E7
taaaaagagtttctctctttctgacctcgcattattcatcttccagaagactctcctnatgcaatccactaaaatcattctcgtaaggactcctcccttcgccgatcttcattcagagctttttccacaccaattttgaacatattctgcataagactcaaaat

SEQ ID NO: 4276 - DNA, 161 bp, Gossypium hirsutum
  unsure (1)..(161): unsure at all n locations; Clone ID: LIB3493-028-P1-M1-E8
agcttcatcagggttttttgnaggccacgcaaaacatggcggctgcttgtgnaanaanatctctattnttcttcttcttttcctccaacaccatttttacccattttaccatgctgggggcctggttactatttttttttttgtccttttctaaactaaca

SEQ ID NO: 4277 - DNA, 467 bp, Gossypium hirsutum
  Clone ID: LIB3493-028-P1-M1-F1
cccacgcgtccgattgtcaccgccacagatttgtgtgctccaaattatgggttcacggcggaaggcggtgggcgttgtaatcctcctaacaaacactttgtacttcccattgaagcttttgaaaagattgctatttggaaagctggcaacatgcctgtccagtatcgaaggataaagtgcagaaaagaaggaggtgtacgattcaccattgatggctcagggatcttcgtgtcagttctcatcagcaatgttggaggcgctggtgacatagctgcagttaagattaaaggttcaagaacggggtggttaccgatgggtcggaattggggacaaaattggcatataaattctgatctaaggaatcaaccactttcatttgaggtcactaatagtgatggtcttacacttacatcttacaatgttgctcctaaaaattggaactttggccaaacttttgaaggaaagca

SEQ ID NO: 4278 - DNA, 119 bp, Gossypium hirsutum
  Clone ID: LIB3493-028-P1-M1-F10
cggacgcgtgggtccggacccgtgggtgtttgcaagtgatttcactgtttcaaaaactgcttttccttaatgtaataattgttgtttttcaagggtatggattgttttttgagtttgtc

SEQ ID NO: 4279 - DNA, 456 bp, Gossypium hirsutum
  Clone ID: LIB3493-028-P1-M1-F11
ggtggctcaagttctggtgccgatgcagcatctgcttccacatgggttcctcatcccaacccttcaccacaatacccacggagattgtcagaacttgttcgtcgatcattgatgtcttccgctggtgctgaatctggaggtcatgtcaatcattctccactttcttcaggacttcctacttccccagaagagatgctgctttcctccggtgtacctaatcagggccaccatcgtcaataccctaggtcagtctcatggttggagagacaagatgctggcttccaaggaattccccattcattgcggaccttggctgctgcaactgaaggaagaagcaggcttcttgcgtccgagatacgcaatgtcttggatctcatgcgtaggggtgagaacttgcgttttgaggatgttatgatccttgatcaatcagtatttcttggggtagctgatattcat

SEQ ID NO: 4280 - DNA, 387 bp, Gossypium hirsutum
  Clone ID: LIB3493-028-P1-M1-F12
attaagctcttaaagcagcacgattccgtcgtcagtacttaccgtgatcacgtgcacgccttaagcaaaggcgtctctgcacgtgctgtcatgagtgagctcttcggtaagaccaccggctgctgccgtggccaaggtggatcgatgcatatgttctcgagggagcacaatgtgctcggcgggttcgcttttattggtgaagggatccctgttgccaccggtgcggcttttacatccaagtataagagggaggttttgaaagaagcagattgcgatcacgtcactttggcatttttcggggatgggacttgtaacaatggacaggtctttgagtggttgaatatggcagcgttgagggaattgcccatcgggtttgttgttgagaac

SEQ ID NO: 4281 - DNA, 469 bp, Gossypium hirsutum
  Clone ID: LIB3493-028-P1-M1-F2
tgcatatgcctctgctgcgaatgatgagggaacatttctgtggataaccgtttttatcaccagtagatttcccctcatatcccaaccaactagtcctgtcgctgatttgaaggttctactatccagtgctgcatcaaatttgatcgatattctcggtacgttttcctgtatactgtgactcttgaaaatttttttctcagttttcttctcagcatttattccctcatattctaccatatgtctttgaatattctgagctaatccccttcctgttgaatttttgccctcgtgaatgagtttgtttctaaaggaccatatcaaccataacgcatagcagaaaagccgacactggtaattgttgctgttcttgaaaacccaggacactctcggaaaacatgaagacgctcttctactccaaaataacatcgtggacagcgggcagttgaactaaccctcctcaagctgagat

SEQ ID NO: 4282 - DNA, 359 bp, Gossypium hirsutum
  unsure (1)..(359): unsure at all n locations; Clone ID: LIB3493-028-P1-M1-F4
gggcgaaacaaaagagctgtactgacaggtaaagacaggggagttgatcactgttctttttcgagtttcnaagtgcaccttgttggtttctgcacttaacaagactttttctctttcgaactcagcactgtgaatgaaaccaggaatttctattctttgtatcaatggcgtttaggcgtagcctttccaggagagcaaccctaatcgctagacgatgtcaaccgtcattttcctacattgtccattaagattaccgttaaaatcatcctttaatctagttctactctcatccaaaacctagctatttgtttcatcatatatcttttggaactgggtctagtaatctattattaggcttt

SEQ ID NO: 4283 - DNA, 160 bp, Gossypium hirsutum
  unsure (1)..(160): unsure at all n locations; Clone ID: LIB3493-028-P1-M1-F5
attaaagcaatgggttgagcaaagattgaanaggaaagtctattcgagcaaaccantcatgactcaattgtgtgtgtactcgatgacacctgatgaggatttcgtgatcgattttttgggaggggagttcgggaaggatgtggtgatcggaggtggattt

SEQ ID NO: 4284 - DNA, 459 bp, Gossypium hirsutum
  Clone ID: LIB3493-028-P1-M1-F6
cccaaggccgtccagtatgtgagaaagggtcgtgggacacccatggttttggacaacaactactacaggaacatactggacaacaagggtttgttgattgtggatcaccaactggcttacgacaaaaggaccagaccttatgtgaagaaaatggccaagagccaagactatttcttcaaggagttctcaagggccattactctcctctctgagaacaatcctctcactggtagcaagggtgagatcaggaagcaatgcaatcttgcaaacaagcttcactaaaatgcctcgccaaagagaaagccgagagtggccgaataaaatggttgtttacttgtttcttttccaagagacaagtttgttaatgtgcagtgagtaatggtgcaatggtactggtttgatacgatcgatccattgcatttttttttagcataagccaggttgccttctcttgatgtt

SEQ ID NO: 4285 - DNA, 451 bp, Gossypium hirsutum
  Clone ID: LIB3493-028-P1-M1-F7
aaaaaagtgaaaatggagtgcgtgttcggcttcgtaggcaatggctttgccgtagtggccgcggacacatcggcggttcacagcatcctcgtccacaaatccaacgaagacaagatcatggtcctcgattctcacaaactcatacacgcctgcggtgaatccggtgacagagtgcaattcacggagtatatacagaaaaacgtggctttgtatcagtttcgcaatggtattcctttgacaactgccgccgctgccaatttcactcgcggtgagcttgccactgcattaaggaagaacccatacttcgtgaacattcttcttgctggctacgacaaagagacaggcccctcactttactacattgactacatcgctacacttcacaaagttgataagggagcattcgggtacggatcctatttttctctctctatgatggacaggcactacc

SEQ ID NO: 4286 - DNA, 340 bp, Gossypium hirsutum
  Clone ID: LIB3493-028-P1-M1-F8
ggcatattcctgtgatggaacttgcgcgtgcagtacaaggactcaatcatggactcaactgtgaattgcagggagaatggtggactgtttgatgtatcccatatgtgtgggctgagccttaagggaaaggactctgtttcattccttgaaaagctcgtcattgctgatgtagctggccttgcccccggaactggaactctaactgtttttacaaatgagaaaggaggggcaatcgatgattcagtgattactaaagtgaaagatgatcacatatatctggttgggaatgcaggctgcagggataaggatctggctcacattggaaagcatatgaaagcat

SEQ ID NO: 4287 - DNA, 390 bp, Gossypium hirsutum
  Clone ID: LIB3493-028-P1-M1-F9
cccaacttgccaccagtcgtcgaacccagtgcgaaacggtccactaaagaccgtcacacgaaggtggatggtcggggacggcgtataagaatgcctgcagcttgtgcagcttggggtgttcagttgactagagagttgggtcataaatctgatggtgaaacgattgaatggcttttacagcaggctgaaccggcgatcattgcaaccaccggaactggtactataccggccaatttttcgactcttaacgtttcgttgagaagtagtgggtctacgctttcagcttcaccgtcgaaatctgcttctcactcgttccatggtgctttagctttggcttctcattatcacccatatgaagaagggtttgcttctagcgctttgttttgtctt

SEQ ID NO: 4288 - DNA, 452 bp, Gossypium hirsutum
  Clone ID: LIB3493-028-P1-M1-G1
attaaaagctatcatcacaaatatcacacatacggctcccagatctgctcttacctctcaattccagtataaaaggtaagggtttctaaaatatcaacgagaacaaaaaaccgtgaatactgtgatggcctctgagagggaagtttttggtctttcgggtccattacacctaaccaatatagattggaataatgcacatcatcgaaggtcagtagcagccagtttggttgagggtgtgtatatcttggagcgagaccgtcaggaaaaacgtgaaggttctcaagcattggctcctccctggtgggagttctttcattttaagttggttcgtaagctgatcgatgatgttgatttttgcatctttggtgctatttacgagtataagcctccatcgtctcattgtaatgactcaatagtctcaattgatggaaatccccgctatgtgattgcgt

SEQ ID NO: 4289 - DNA, 182 bp, Gossypium hirsutum
  unsure (1)..(182): unsure at all n locations; Clone ID: LIB3493-028-P1-M1-G10
cagcgaaccggtctccataccgaagaagatactcacaagtataagcaaattanatcnaggttctccgataaggtcttcaatttgatattggcttggtagttgcttctccaaaattcaatatggttgttttttttttttctgttctaaacaaaaatagcttatttcttttttcttgttaattt

SEQ ID NO: 4290 - DNA, 289 bp, Gossypium hirsutum
  unsure (1)..(289): unsure at all n locations; Clone ID: LIB3493-028-P1-M1-G11
ccgaagggtcacatagttgcgacatcagcagcatttgcaaacaggcttcctcatatttacaaggatccagacacatatgatcctgatagattcagtgttgggagggaagaagacaaggcancangggctttctcgtatatttcctttggaggaggcaggcatggttgccttggtgaaccgtttgcttaccttcagataaaggctatatggagccatttgttgaggaacttttagtttgagcttgtgtcacctttccctgagatagactggaatgctatggtggtatgtg

SEQ ID NO: 4291 - DNA, 292 bp, Gossypium hirsutum
  unsure (1)..(292): unsure at all n locations; Clone ID: LIB3493-028-P1-M1-G12
ttcgactggcagcactaacacggagacgatggaagggaagagagaaaaactaagaagatggaggctttgggatggtggttaatgctggtgggttcacttnnattagcattcgtttggtgcggctttttttttattttggcttttcggcttgatgatatttctaacaccacttttgttttaagttcttgtgattagattattgaatttttttttttaactactatttttcttcttctatgatttattttttgtatttttatttttatatgataattatttttttttatttatt

SEQ ID NO: 4292 - DNA, 180 bp, Gossypium hirsutum
  unsure (1)..(180): unsure at all n locations; Clone ID: LIB3493-028-P1-M1-G2
ctttagtttgtttcatttattatcttctgtagcagtttttaattaataacaagaccacaccnaacaaaaataaaacccaaaaaaaaaaaacatataaaaaaaaacaaatctcctaaaaagcttttttttcctctcatattttttattcatatcataaaaaacacattcatcctcaccaat

SEQ ID NO: 4293 - DNA, 133 bp, Gossypium hirsutum
  unsure (1)..(133): unsure at all n locations; Clone ID: LIB3493-028-P1-M1-G3
tatggcccctgaggttcttgaangtaagccctagaacatatcatgtgatgtctacanctttngcatttgcttgtgggaaatttattgctgctatatgccttatccagaccttatctttgccgatgtgtcattt

SEQ ID NO: 4294 - DNA, 183 bp, Gossypium hirsutum
  unsure (1)..(183): unsure at all n locations; Clone ID: LIB3493-028-P1-M1-G4
aaaattttctttccatttctccttttcgctgncgtcttttttccccttattttctctccataagaactctttttctcttcattctcccaatatcttcatttgaagcaactatgtcttttagaggaggaaatgcatcttctggcatgggaatggctgaacacagcaaaatcacttaccttgaac

SEQ ID NO: 4295 - DNA, 69 bp, Gossypium hirsutum
  unsure (1)..(69): unsure at all n locations; Clone ID: LIB3493-028-P1-M1-G5
tcccactcgtcctcccacgcgtnctgaaagtncagtatctatttcaattggatgtcactccattntctt

SEQ ID NO: 4296 - DNA, 316 bp, Gossypium hirsutum
  unsure (1)..(316): unsure at all n locations; Clone ID: LIB3493-028-P1-M1-G6
cgttgatctacaccttcntggcaccacgcacccgtntcttatcaaaatatacggagttcaccntaaactttaccnnaatatcttctcattttctccagaaactttcttcttcaaacaacaagttcacttacaactttctattgccatctttaactatcaaaacaattacttcttctcttattttatcatttttattctatacctttacttacatattaaaaaattatattcttacaataaatactattaacttctcttctttctaacttattcaaactaatataatatattcttatcataatatatttaaatttat

SEQ ID NO: 4297 - DNA, 355 bp, Gossypium hirsutum
  Clone ID: LIB3493-028-P1-M1-G7
cttagatgcagtatttcaaatggtctagtctctcatcaatgtgggttttgttgcctttaaattgtgttctctttattttcctacaattgaggatatggtccatttttattgtgaactctttaggcatttgttcaagtccgttaaattgtgctgttcttttaatcaaaagttaaagaaaaaagaattattgttaaaaaaaaaatataaaataaattttaaataaaaaaatatataaaaaaaaaaaagaaaaatattataaaaatttataaattaagtatataataatataataaaaatgaagaagaattatataattttgatatgttagggggtgtaaatgaataatgtagtatat

SEQ ID NO: 4298 - DNA, 66 bp, Gossypium hirsutum
  unsure (1)..(66): unsure at all n locations; Clone ID: LIB3493-028-P1-M1-G8
tctctaatncanttttnngcgcgcccgcctttttaaatcgctcttcccccttaatttttttctctt

SEQ ID NO: 4299 - DNA, 223 bp, Gossypium hirsutum
  Clone ID: LIB3493-028-P1-M1-G9
cttccacaaatctcccatttagcttctgctccctaagacgcttcgccccataacccatctaacaatggtagcctcaaaattctgttttgctttgtctcttgctattctttcaatctgggccgttgatgctgcccaacaccatgctctggcgccctctccttcttcccccgtggactgctcctctctgattctcaacatggcggatcgtttggcctttgtgtct

SEQ ID NO: 4300 - DNA, 448 bp, Gossypium hirsutum
  Clone ID: LIB3493-028-P1-M1-H1
caaaaatgatgatcggagaatcaatccagccaaagcccaccatcaaaatccccgtaggggacccattcaacgatccgacggctagctttcactcctttaactttaactacaacaatgcagtcagtagtccttgccccgtcgattacctcgggtctctccaccgttacctaccgtcaaacgactacgagtccgattcgctgagtgatgcattctcatgcgaccatttccggatgtacgagttcaaggtgaggaggtgtgctcgtggaaggtcacatgactggactgagtgtccgtacgctcaccctggtgagaaggcccgaagaagggacccgagaaagttccattactctggaactgcttgccccgattttcgcaagggaagctgtaagaaaggcgattcatgtgaattcgctcacggcgtttttgagtgttggctccaccctgctcg

SEQ ID NO: 4301 - DNA, 151 bp, Gossypium hirsutum
  unsure (1)..(151): unsure at all n locations; Clone ID: LIB3493-028-P1-M1-H10
gtaatttgtcgaggcaaaaagcagcttgtcgtgtttggcttgagccattattcttnaattgcatgtatgatcaaggaatgttaatgcaatattgttancactggtcattttagttggtggatcttttttttttttttttatattttatata

SEQ ID NO: 4302 - DNA, 128 bp, Gossypium hirsutum
  unsure (1)..(128): unsure at all n locations; Clone ID: LIB3493-028-P1-M1-H11
ctcttgctcgaaccctccagaggacacggaagggcatatatgatgcttagcatgaataatgatggaagtgattatgggagttgggagggtggnnngctttntaacgatgaggggggggaggatcttta

SEQ ID NO: 4303 - DNA, 467 bp, Gossypium hirsutum
  Clone ID: LIB3493-028-P1-M1-H12
agacgagagcccatctctctgcttcagagctcctgtccaggtagaattctcttcttcccttgcgttgtgttctttgctgttcaatcgccatggcttcaaagcggattttgaaagaactcaaggatttgcagaaagatccacccacttcttgcagtgctggtccagtagctgaagacatgtttcattggcaagcaacaatcatgggaccctcagatagcccttatgctggaggtgtgtttttagttactatccatttccctccagattatcctttcaagcctcctaaggtcgcgtttaggaccaaggtcttccatcccaacatcaacagcaatggaagcatttgtcttgatatcctcaaagaacaatggagccctgcactaaccatttccaaggttctgctctcaatctgctcgttgctgaccgatccaaaccctgatgaccctcttgttccggagattgctcacatg

SEQ ID NO: 4304 - DNA, 430 bp, Gossypium hirsutum
  Clone ID: LIB3493-028-P1-M1-H2
aggagacttccttgtaccatcctaccgtggctgagctttcttggacccaaagggaaggggtggctcaaccggttacgataatgcagtggccttgcctgctggaggaagaggggatgaggaagagctagccaaggagaacaacaagagtgctgcatcttcatcagggaaaatcaccttgagcgtcacaaagagcaagccggagaccggtgaagttatcggtgtgttcgagagccttcagccatctgacactgacttgggtgccaagactccaaaggatgtcaagatcactggtgtctggtatgctcagcttgattcataaacaagtcttgtatgaatttgtttattctcggctgagattttgtaatttttaaacaagtgttgctaaactttgcagtaatccactgagaaacccttatcttctttgtatgtt

SEQ ID NO: 4305 - DNA, 447 bp, Gossypium hirsutum
  Clone ID: LIB3493-028-P1-M1-H3
cttcttttcctacgccaaaatgccgccgaaattggagtccaagccaagtcgtcgacgtcttcgtccgcgtcaccggcggtgaagtaggagcagctagttcactcgctccgaagatcggtccgctcggtctctctcccaagaagatcggagaagatatcgccaaagagaccgccaaggaatggaagggtctccgcgtaaccgtcaagctcactgtccagaatcgccaggcgaaggtcacggtggtaccgtcggcggcagcgctggtaatcaaggcattgaaggaaccggagagggataggaagaagaccaagaacatcaagcataacgggaacatcgcactcgatgatgtcatagagatcgctaaagtaatgaggccgaagtccatggctaaggatttgagagggacggtgaaggagattctgggcacctgtgtttccgttgggtgtt

SEQ ID NO: 4306 - DNA, 341 bp, Gossypium hirsutum
  Clone ID: LIB3493-028-P1-M1-H5
ctcctctgtttattcgcttcagctcatgacttggcgtgctctctcgtcctccctcaccaaatcaaaatgtctctggtggcgaacgaagactttcagcacattttgcgtgtactgaacaccaacgttgatggaaagcagaagattatgtttgctttgacctccatcaagggtattggaaggcgtttcgctaacattgtttgcaagaaggctgatgtcgacatgaacaagagggctggtgaattgactgcacaggagctggacaatctcatgaccattgttgcaaaccccaggcagtttaagatacctgactggtttttgaataggcagaaggatttcaagga

SEQ ID NO: 4307 - DNA, 455 bp, Gossypium hirsutum
  unsure (1)..(455): unsure at all n locations; Clone ID: LIB3493-028-P1-M1-H7
ctgccttcctattttgctacatttgcgcgtcctgtttctgtgtttcctttcagtaaacgttgccgacttagactcagataagcaagccctcctgcgattttctgccagggttcctcatggtcggaaacttaactggagctctgctactccggtatgcacttcgtgggttggcatcaactgcaccaaggatcaatcccgtgtgatggctctccatcttcctggtgttggactacatggtccaattccagccaatacacttggaaagttggatgctctcatgatcctcagcctccggttgaatagtcttagcggtaaccttccaacggatgtactctctcttccttctctccgttacatataccttcagcacaacaacttttcaggtcacattcctncatctctccctccccatttgaatttccttgatctctcctttaactccttgacaggcacca

SEQ ID NO: 4308 - DNA, 470 bp, Gossypium hirsutum
  Clone ID: LIB3493-028-P1-M1-H8
gggaaagggaagctttatataacccatgtgctttctctctaaactctcttcctttccatctttcctttctttgctttgcttgtttctattgagagatttccactaacaaaagctctagactcttgtcttcccacattttctctcaccatgatttccttgcacagaagctgttttctgaacaacactggcatttctgggtcatcaagccctttctcatacaagctgaagaagctgccaccagcttctgtcaaagtcacagctttaggccccaacagggatcgaaacagcagcgttttgattgaaaaccacaacaacccattgaaagaaataaaagaagatgacacttcttctgttgctgatgtggaccccaatcctactgttaccggcgaagaccgcgacctctactatgacgccgccgccaccgacgatcaacttgtcaccccttggtctctctctgttgccagtgggta

SEQ ID NO: 4309 - DNA, 204 bp, Gossypium hirsutum
  unsure (1)..(204): unsure at all n locations; Clone ID: LIB3493-028-P1-M1-H9
tcggactcgtgggctnactcntgcgtccgttctatatcaaaaaaatctcttncttttcntncattttttttttgntttacaatnttctatttagatattttctaattataaattctgtagaatcttattttttttttttattattctctcacatataatattaatttattaaatttaatctaatttattttaattatacaattt

SEQ ID NO: 4310 - DNA, 412 bp, Gossypium hirsutum
  Clone ID: LIB3493-033-P1-M1-A1
atgatatcttgcagaacaatagctatgagatgcctgatgtcatatttgacagtttaaaggccaatcaaaatgtgcttccttatgttcctgagcttcctgttttatccgctagcagcatgctgatgaaaggtctaggttcttctcaatattgtggttttatgcaaccaacgatccatcgccagaagcgtcttcgggagtcaccagccttttttcctggttacactggtgctgttaaaaacgaatgccctttgtttatgcagtttcaagatgatatatcagacaaggctgctggatcctttgggctgtcttttccaattgaaccagatcctgcaacaaagaactcccagccttttggtgtattcccaggtagccatgccctttcaaaatgcaatttctctgcttcagagccccc

SEQ ID NO: 4311 - DNA, 458 bp, Gossypium hirsutum
  Clone ID: LIB3493-033-P1-M1-A10
tgagttttgaatctagggatttgcgggtggagaagacgagagctcatctctctgcttcaaagctcctgtccaggtagaattctcttcttcctttgcgttgtgttctttgttgttcagtcgccatggcttcaaagcggattttgaaggaactcaaggatttgcagaaagatccacccacttcttgcagtgctggtccagtagctgaagacatgtttcattggcaagcaacaatcatgggaccctcagatagcccttatgctggaggtgtgtttttagttaccatccatttccctccagattatcctttcaagcctcctaaggtcacgtttaggaccaaggtcttccatcctaacatcaacagcaatggaagcatttgtcttgatatcctcaaagaacaatggagccctgcactaaccatttccaaggttctgctctcaatctgctcgttgctgaccgat

SEQ ID NO: 4312 - DNA, 408 bp, Gossypium hirsutum
  unsure (1)..(408): unsure at all n locations; Clone ID: LIB3493-033-P1-M1-A11
gcaattttggagatctgacgaaaaagaaantgttaaacttatcgaagtagccgaaataaaagatgattcaccggaaatggagtttgctaacaggcccagttgtcatcctgggcggcgttgtgggagctaccgtcgtcgctcactttctctttgttgacgatccatatcttaaaccaaagaagaatactgattcaccaccacaaaccaagtagaaagaagccgaccgtcgctgttggcatttacagcaaagaaatgcctangtgctgtttgaaacatgagttgtttgttgaataatatcaaatctgtttttttttgtaatttgggttagcttctgttttctctttttgaaataacaactcaactacaaagttcttgaacacttgcattgaatctcggaacattgcttaa

SEQ ID NO: 4313 - DNA, 421 bp, Gossypium hirsutum
  Clone ID: LIB3493-033-P1-M1-A12
ctataatgagagggtcctgccttcagatcattgatgaaactttaaaagctgttgttgctcaatacaatgctagccaactcattacacagagagagaatgtcagtaaggaaatccggaagattctgactgaaagggcagcttacttcaacattcaacttgatgatgtgtccattacaagtctgacttttgggaaggaattcactgctgcaattgaggcgaaacaagtggctgcacaagaagccgagagagctaaatttattgtggaaaaagctgaacaggacaagaaaagtgctgttatccgagcacagggagaagccaagagtgcccaactcattggtcaagcaattgcaaagaacccagcattcataacattgaggaaaatcgaagcttctagagaaattgcacagaccattgcaaattc

SEQ ID NO: 4314 - DNA, 334 bp, Gossypium hirsutum
  Clone ID: LIB3493-033-P1-M1-A2
agttccttgtcgcctctgtagtttgctacactctcacacactcacagcaaaaaatgccgttcaagaggtatgttgagatcgggagggtggctctcgttaactacggcaaagactacggaaaattggttgtcatcgttgatgttgttgaccagaacagagctcttgttgacgccccagatatggtcagaggccaaatgaacttcaagaggcttactttgacagatatcacaattgacattccccgagttccaaagaagaaaacattgattgaagccatggagaaggctgatgttaaaaacaagtgggagaatagctcatggggtagaaagctgat

SEQ ID NO: 4315 - DNA, 249 bp, Gossypium hirsutum
  unsure (1)..(249): unsure at all n locations; Clone ID: LIB3493-033-P1-M1-A3
ctccaccatggctgacggagcccatcggtttgaaccaggcaacatttttacgcatgaagctnatcctgattcttcaacctctatcgatcctgatcctaccggattcggtgctggcataggtataggttatgaaagaagcccttactgtatcgactgcgacgatgtggatatcatgggcggcagcttttgcggcacctgcaattacggatgcccttaccgcaagttcaataatgggtgtggtgttttttt

SEQ ID NO: 4316 - DNA, 283 bp, Gossypium hirsutum
  unsure (1)..(283): unsure at all n locations; Clone ID: LIB3493-033-P1-M1-A4
ttcctaaatatttaatttttttaaccaacaagggcggggcaaaataaaggctttaggcacagcacctnaaaaaaaaaaggaaaaaaaactttcagatcacctttttttgaaccgatttcttcattttgttattttaaaccctcaaatacaaggccttttcgggtcttatattctctctgacaaagaaccgagaaaatcgaattccaaacaaaattaaattattacctaaaccaaaaccaaaaaaaacaattcncttgttctctgctgctctttgtttgagttc

SEQ ID NO: 4317 - DNA, 218 bp, Gossypium hirsutum
  unsure (1)..(218): unsure at all n locations; Clone ID: LIB3493-033-P1-M1-A5
ggagaaaatatctgtgatgggccgatcatcacgcaattgtaagcttctgcttgtgcaagcattaangangaanggacatgttgttgctgtaactggggatggtaccaatgatgctnctgccctacatgaggcttacattggtcttgcaatgggtattcaagggacagaaattgcaaaagaaagttcagatatcatcattttggatgataattttgctt

SEQ ID NO: 4318 - DNA, 73 bp, Gossypium hirsutum
  Clone ID: LIB3493-033-P1-M1-A6
ccttccaatttaatccaaatcttaacctattaaaattggcctttgcaaataaaactacaatgttgaaggaaaa

SEQ ID NO: 4319 - DNA, 473 bp, Gossypium hirsutum
  Clone ID: LIB3493-033-P1-M1-A7
taacaaagcgtttgtcttagatctgagaagatggcccgtaccaagcaaactgcgcgtaagtcgactggtgggaaggctccaaggaagcaacttgctaccaaggctgcccgtaaatctgccccaaccaccggtggtgtgaagaagcctcatcgctaccgtcctggaactgttgctcttcgtgaaattcgaaagtaccagaagagtactgagcttcttatcaggaaattgcctttccagaggcttgttcgtgaaattgcccaggacttcaagactgatttgcgtttccagagccatgccgttcttgctcttcaggaagctgcagaagcataccttgtgggtctctttgaagacaccaacctgtgtgcgatccacgccaagcgtgttactataatgcccaaggacatccagttggctcgtaggatcaagggcgagcgtgcttaatttccaagtgtgttgatcacttaacttaaaat

SEQ ID NO: 4320 - DNA, 429 bp, Gossypium hirsutum
  Clone ID: LIB3493-033-P1-M1-A8
ctgagactcaggctcaaacccaaccgcctggtgttcagcaacaattgcagcagcagaattcatttaataaccatcaacaccaacagcagttacagcatccgctgtcacagcaacaccagcaactggtcgatcatcagcatatttctactggagtgtctgccatgtcacagtatgctccggcctcacagtcccggtcgtcacctttccaagccataccttcactatgccaacaacagagtttttctgactcaaatgggcacaccgtgaccagccccattgtatctcccttgcacagtcttttgggatcctttccccaagatgaaccgtccggtctgctcaacttgcctagatccaacccagtaataacatctgcagcatggccatctaagcgggctgctgttgaagttctgtcatctggatctccacaat

SEQ ID NO: 4321 - DNA, 255 bp, Gossypium hirsutum
  Clone ID: LIB3493-033-P1-M1-A9
gtttctcttcttcattctttcatgcccaccggttggcttccattctccatcgtcggccctccccaaaattggaccctttctcgtaccctttttgtcaccgcatttggagcagttttgcacgtaatatccacttctcttcttggtatagctgcaataactatggcgaacacaattgctggtgaagaaacagtgcataaacttgcttcacttttgctcatagttcttggtggtagctatatatagtagtcctttaaa

SEQ ID NO: 4322 - DNA, 377 bp, Gossypium hirsutum
  Clone ID: LIB3493-033-P1-M1-B1
caactttggagaactccttgctcatccaattgtaaagagtgttctggggaccaaggtggagtggctttattatatcctccaatccttcaactctgggaatttggttcgctatgaagaattgtgtcgcgtgcacaatgctgcactgagtgctcaaccagccttggttgagaatgagaagaagctcttggaaaaaattaatattctatgcttaatggagattatcttcagccgcccttctgatgatcgaactattcctttaaaagttattgctgagagaacaaaattgtcaattgaggatgttgagtatcttctcatgaagagcctgtctgttcgtctgattgagggcataattgatcaagttgagggaacaattcatg

SEQ ID NO: 4323 - DNA, 392 bp, Gossypium hirsutum
  Clone ID: LIB3493-033-P1-M1-B11
cgaaaaacagccgaagcagtcgatatcttgagactcatgtcctctacatacttggtagctctatgtcaagctattgatttaaggcatttagaagaaaacttgaggaacacggtgaagaacactgtgagtcaagtagccaagaaaaccctcacaaccggtaacaatggtgaactccacccatcgagattctgcgaaaaggatttgctcaaagccgtggaccgcgagtacgtgtttgcttacatagatgatccatgcagtgctacttatcccttaatgcaaaagctaagacaagtccttgtcgaacacgcattcgccaatggtgacaatgaaaaggatacaaacacttccattttccaaaagatcacagcatttgaagatgaattcaaagctgc

SEQ ID NO: 4324 - DNA, 441 bp, Gossypium hirsutum
  Clone ID: LIB3493-033-P1-M1-B12
gggagtgatgctatctattcttcgtggtgcagaggagcacgatgccgataccatcaacaaagccgtcagtctcgcacttatcttagccgccgaagatactacatcaattacaatgacatgggctttatctttattactcaataatcgcgatgcattgaacaaggtcaaacaagaactagacatccatgttggtaaagatagactcttaattacagaatcagatactaaaaacttagtgtaccttcaatctgtcattaaagaaacattacgcctctatcctgctgctccacttgctgtaatccatgaagccattgaagattgctcaattcatggatatgatatttcaggcggcacttggcttattctcaatcttcaaaagatacaacgtgattcacagatatgggaagatcctttaaaatttctaccagaaagatttatgac

SEQ ID NO: 4325 - DNA, 232 bp, Gossypium hirsutum
  unsure (1)..(232): unsure at all n locations; Clone ID: LIB3493-033-P1-M1-B2
gggcagatgcataagtacctgttatctttcagtttaagacataacatggacgcctccagcanctgcaccacggagaagagagaaaaactgaaaaaggggaaaaaaagcgtcgtcgnttttgcttcttgttcttcttgcctctctctctttctcagaagctcctctttcgttcttttgttcactaagtattgtaaaagatggcctacggtgaggatatttaacctctagtctg

SEQ ID NO: 4326 - DNA, 418 bp, Gossypium hirsutum
  unsure (1)..(418): unsure at all n locations; Clone ID: LIB3493-033-P1-M1-B3
agggtggtgaatagaaagaggtaatgcaaaagtcgaaggcgatgctagaccaagaagtannctatcaagatgataattccagttcgctgcttcacctgcggaaaggtcattggtaacaaatgggacacttatcttgatcttctccaggccgattataccgaaggagatgctcttgatgctttgggattggttcggtactgctgtaggagaatgcttatgactcatgttgacctcattgagaagcttctgaactacaacacattggagaagtcggagaccagttgagggaacatgtanaatctaagggtttgttgcagtttgtgttagtgcctgtcaatgatggccgtgatctgaatccaaaaaaagggaaaggaaaggcttaaatagtactagtctagtttgttttctttagctctat

SEQ ID NO: 4327 - DNA, 471 bp, Gossypium hirsutum
  unsure (1)..(471): unsure at all n locations; Clone ID: LIB3493-033-P1-M1-B4
caaattcacctttagagcctgatatattgatgccgaggattctgtcactagagaaagtgaaatgtccgatgatccanctggagccaaagaaaataaacagtttgtgccattcattttttccccatcaatttctcctgcatcaatctctgcaagaggaagtgatcctccagctagtttgagaccaaaatgtgaggccaatgttgacctacaggatgttttagctgctgctgaagctgctgctgaaactgccgaacatgcagcagctgcagcccgttcagctgcaagtcttgcacaagttagaattgctgagcttacacagaaaaaaaatgagcgggttactgagagtagcagccctgagaaccctattcatacatatattcctcatcaacaagctagtacagaaaagctaaattttgatcatcagaacttttgtattgatcctgctgattctttatattctttggactccca

SEQ ID NO: 4328 - DNA, 98 bp, Gossypium hirsutum
  Clone ID: LIB3493-033-P1-M1-B6
ttcacaccaacccttccgttgaaaggaaataaattccaaattctttcctgggtccgaaattgattggaaagaaaatttttttttataaaacaccaaaa

SEQ ID NO: 4329 - DNA, 345 bp, Gossypium hirsutum
  unsure (1)..(345): unsure at all n locations; Clone ID: LIB3493-033-P1-M1-B7
ctacaagaatgtattggccgttgctgttgcagctgagtattccttcccccaggctgataaagtgaaggagtacttggcggatccaagtaagtttgctgttgccgctgcccctgttgctggtggtggtggtggtgctgctcctgctgctgcccctgccgaggaggaaaagaaacctgaacctgaagaagagtctgatgacgatatgggattcagtctcttcgactaaggttatttgtattaaagcataaacatataggattattgacagtttacattatcctgcttatgggttctcataggtctcngtgatgtactttgattgctctaagttttggatgatttatg

SEQ ID NO: 4330 - DNA, 387 bp, Gossypium hirsutum
  Clone ID: LIB3493-033-P1-M1-B8
cgaaggataggctcgcacttcagaggcttcgggaagctgctgagaaagctaaaattgaactctcatcaacatcgcagactgaaattaatcttccatttataacagctgatgcttctggggcaaaacacttgaatatcacattgaccagatcaaagtttgaatctttagtaaatcacttgattgagaggaccaaagctccctgtaagaattgcttgaaagatgctggcatttccacaaatgatgttgatgaggttcttcttgttggagggatgacacgtgtacctaaagtgcaagaagtagtttcagggatctttgggaagagtccaagcaaaggagtcaatcctgacgaggctgttgctatgggggcagcaattcagggtggtatac

SEQ ID NO: 4331 - DNA, 432 bp, Gossypium hirsutum
  unsure (1)..(432): unsure at all n locations; Clone ID: LIB3493-033-P1-M1-B9
gccaagaagccaggcctgttcaacgatccagggtccaggactccactggtgccgggtcctcacgcgagcctaagaataaagaaaccacaaaaagtacaatggggagacgagcaaagagaacgctcaatcgtgaggctgccaataaggctgctgaagaaaaacatcaagagcatttgatgagttcgaggctgaagtgattttcttcgacgttgaagtgtttaataaaaaccttaatactgaagaataagataaaccggaatccatgtatttggttcttgtattgtacagtattttctttctctgcaacaaaaataacgacattgtcgaattcgtatctatcggtttatgcagtcatctntaagaggtgacattcagttaaccgatctcggcgttgtatcttcttccttggtgacttggtagggaaggatttgt

SEQ ID NO: 4332 - DNA, 445 bp, Gossypium hirsutum
  Clone ID: LIB3493-033-P1-M1-C1
ccctggaaaccgttcaaacgaacctaactgggagcatggggaacagcacaacacgtaagctggcttacgctgctcacaacagggccaattgaaaatcagcgctgaccgagacgcattttactctacttgctgcgtatgacgctagtaaagctaaaaactgaactggctcttggtaatgtgacaatgttggtcaggctagatctttacagaggtcacaagattttagaaaacaattgtttatcatgactgatcactacagactgaacgtagtgagtgcaggaaagaactttattaatatcactaaagctatcacaagagggttcttcttccatgctgcaaggaaagacccacaggacggatatataacagtggtggagaaccagcctgtttatattcacccaactggcgccctttttcagagacaaccggactgggtgatctacca

SEQ ID NO: 4333 - DNA, 261 bp, Gossypium hirsutum
  unsure (1)..(261): unsure at all n locations; Clone ID: LIB3493-033-P1-M1-C10
gggatgtggatgatgacactnccacgggcctgttttataaccaaaagggcaaangcattttcaagcttgattccaatttcaagatgcctgaacccaagcccgatcaccgcaaaagaatggccttgaactgtgaataatcttctttggacaccgacatcaagaatgccggcaacgtcgtgctcttgaacactaaaaacctccctttggtcggccagctgggtatagagttctatattatcaaattgctacgaaattcaatct

SEQ ID NO: 4334 - DNA, 447 bp, Gossypium hirsutum
  Clone ID: LIB3493-033-P1-M1-C11
ccaattcaaaggaaattgaaactcgctcagggccataaacaaaggaaagcaaagagaaagaagcttttcatttcaagggttttagcaatggcaaccaatacacaagaccagcaatctcaggctggtaggcaccaggaagttggccacaagagccttttgcaaagtgatgctctttaccagtatatcctcgagaccagtgtgtatccgagggagcctgaacccatgaaggagctcagagagttgactgccaagcacccatggaaccttatgacaacatcagccgatgaaggccagttcttgaacatgcttcttaagttgatcaatgccaagaacaccatggagattggtgtctacactggctattctctcttagccactgcccttgctatccctgatgatggaaagatcttagccatggatgttaacagagaaaactacgagctgggt

SEQ ID NO: 4335 - DNA, 417 bp, Gossypium hirsutum
  Clone ID: LIB3493-033-P1-M1-C12
gacaattcaacgggcttgttgatgtctacaggagaaaccctaaaatctgatggtattgccgggctttaccgtggtttcaacatttcatgtgttggaatcattgtttaccgtggtctatattttggaatgtacgactctctgaagccggtgcttttgactggaagcatgcaggatagtttcttcgctagctttgctcttggttggctcatcacaaatggtgctggccttgcatcttacccaattgacactgttcgtagaagaatgatgatgacttctggtgaagctgtcaaatacaagagctcgcttgatgccttctctcagatcttgaaaaacgaaggtggcaagtctctattcaagggtgctggagctaacatccttcgtgccattgccggtgctggtgtgctcgctggatacgac

SEQ ID NO: 4336 - DNA, 451 bp, Gossypium hirsutum
  Clone ID: LIB3493-033-P1-M1-C2
aagcaatattgggtggaaagagtttcatagagctaagggaattattatagatccagggttgtacagtttgaaaaaagctgatgtgttttgggttactcaaaggagaagcgtgcctactgcattcaaactctttacaggttctgcttggttggcactttctcgatcttttatcgattactgcatttggggatgggacaacctacctcgaacagtcctcatgtactacgctaactttttatcttctccagaaggttacttccacaccgtgatttgtaatgctcaaaaattccgtaacactaccgtgaacagtgacctccatttcatatcatgggataaccctcccaagcaacatcctcattacctcaggctgaatgacatgcaacggatgatcaacagcaatgctcctttcgcaagaaagttccctcgggatgatcctgcagcgctagacaaa

SEQ ID NO: 4337 - DNA, 305 bp, Gossypium hirsutum
  unsure (1)..(305): unsure at all n locations; Clone ID: LIB3493-033-P1-M1-C3
cgtcaatgctgcagtcgccaccattaagaccgagcgcagcattcagtttgtcgattggtgtcctactggattcaagtgcggtatcaactaccaaccacccactgttgtccctggtggtgatctcgccaaggtccagagagctgtttgcatgatttctaactccaccagtgttgctgaagtcttctctcgcattgaccataagtttgatcttatgtacgccaaacgtgccttcgttcactggtatgttggtgagggtatggaagaaggagaatntctagaggctcgggaggatcttgctgcattgg

SEQ ID NO: 4338 - DNA, 222 bp, Gossypium hirsutum
  Clone ID: LIB3493-033-P1-M1-C4
cttttaagaccagagcttggaaatgatataatcattattttgcatcttttcatagttttcttctacatgttgtccttttgtgcatctacttcactgatgtgtctctcaactttttgtctcacttaatttggattatgttttatggtgttaattaatgtgtgtaaattatcctagagatatatgcttgtatttagttatcaatgaaggattcttttttatctc

SEQ ID NO: 4339 - DNA, 441 bp, Gossypium hirsutum
  unsure (1)..(441): unsure at all n locations; Clone ID: LIB3493-033-P1-M1-C5
aaaggctttgcatgtattccacttttttgtttaagtgccctgcaattggacaatgaaatttacaccaangcatcatccttatataaatctatcgatattcacaacaaggcttgtgcatccattgttaacaaaggcgaaccattaaaaacacaattgatatatgcacctgttagaaaatattccccttgtttagatgacagaaaacaaaacaagtgttcaagtgccacttgctttgatccttggcaatcatctgcttcagaatgtgaagattcaacttgttcaaacaataatctcagatctgagaaactgttagcatcagatgaaggcttaggaaattctttgggcaaaagtatagcaggtttcccattagatgcctcagatttggccaattttctcaccagggaccggcacataggattcaattgcagtgcacaaaattct

SEQ ID NO: 4340 - DNA, 101 bp, Gossypium hirsutum
  Clone ID: LIB3493-033-P1-M1-C6
acatattttgtattaatattcttatcctcatctgtaaaaaccttttagctgagaaatacattaatcttgatctaaggctatttttattttataatattatt

SEQ ID NO: 4341 - DNA, 250 bp, Gossypium hirsutum
  Clone ID: LIB3493-033-P1-M1-C7
attgacttgtccaaaatcaatggtgaggagagaggagccaccatggacatgatcaaagatgcttgtgagaattggggtttctttgagctgacgaaccatggaatatctcatgaactgatggacactgtggagaaactgacaaaggagcattacaaaaagtgcatggaggataggttcaaagaaatggtgacaagtaaaggtcttgaagttgttcaatctgagatcactgacatggattgggaaagcactt

SEQ ID NO: 4342 - DNA, 372 bp, Gossypium hirsutum
  Clone ID: LIB3493-033-P1-M1-C8
ggagagaagccagtttcaatcggcgcttaatgtaaactgttacgaaaaagacattgggtcttcccaaatcttggctttgcattgatggcggatctcaagtcagcatttctcaatgtgtattcccagctcaaatcggagctccttcaggatccttctttcgagtttaccgatgattctcgtcaatgggttgaacggatgctggactacaatgtgcctggagggaaactgaatcgtggactttctgtgattgatagctaccgcctgttgaaagatggaaagaaattgacccaagatgagatttttcttacaagtgcgctcggttggtgtattgaatggccttaggcatattttcttgttcttgatgacatcatg

SEQ ID NO: 4343 - DNA, 452 bp, Gossypium hirsutum
  unsure (1)..(452): unsure at all n locations; Clone ID: LIB3493-033-P1-M1-C9
ggagcttaatgcatcctccaatcgtgtgcaggatctgcctgactccggtggtttgttgcttaatctgaggatcctcgatgtctcgggaaacaagctaaatgccctcccggaaagcattgcacgatgcagttcactggttgagttggatgcaagctttaacaaccttacatttctgcctaacaatattggatatgggctcctaaatcttgaaaagctgtcaatccagctgaacaagatccacttcctaccatcatcaatctgtgaaatgaggtccttgaggtatctggatgctcatntcaatgagcttcatggcttgccacaagtgattgggagaatgacanaacttgaagtcctgaaccttagtagtaatttcaatgacttcacagaacttcctgatcctattagtgatctgaccaatctccgggaactcgatctcagcaacaaccaaatcc

SEQ ID NO: 4344 - DNA, 357 bp, Gossypium hirsutum
  unsure (1)..(357): unsure at all n locations; Clone ID: LIB3493-033-P1-M1-D1
cggacgcgtgggttcagaggaattaatacatggttttgatcaaaaagctgctgcttgtgtaatggcaaaaataacttctttaaaaatggaaatggaggggcaaaaacagtgcttgctttagtgaaagtaggcacagatgggtttgatgctacacggtggttggatcggaatctcattcgagtttgttccaaatttggagagtatcggaaggatgatgcatcatcttttacattaaaccctngcttttctttgttccctcaatttatgtttaatctacgacggtcacaatttgttcaggtttttaacaacagtccggatgaaactgcctactttcgaatggtactaaacagagaaaac

SEQ ID NO: 4345 - DNA, 503 bp, Gossypium hirsutum
  Clone ID: LIB3493-033-P1-M1-D10
gagaaaactaaaggttaagtgaaggtgggagcggagcaagcactgaagagaattccacgcattaagtttcctcaaagacaccctaaaccctcgccttcaggttcaatctctgaaacacaagtaacacgcaaagatggagatgtcattggtaacttcattgcaaggtcaaggttgagctcagatgttcctgctccgcccagcaacactgctgtaggaggaaaagcatctcttttgccaaaacgtactcctgtctctgagagggaaatcgaggctattctgttaggcggctgcttctgaattttcagctgtcaaagctagctttcccgaagctcgaaataaaatttctgatctgttatttttctcccatcttagttctctgatatgtaaagaactgtttactgaagtttaaaaagctcaaaagaatcaaaatttgtcttaaaaaatcattgtgggatgagacttcattctcagtgaaataatatgtggaaactctttttttattt

SEQ ID NO: 4346 - DNA, 228 bp, Gossypium hirsutum
  Clone ID: LIB3493-033-P1-M1-D11
gctatcaaccccaccagtacgtgaagatggaagaacataagttcttgactgcagatgaagcttgtaatttcttttcagatgaacaagctccaagtcttcattggtattctcctgaacaatggaactaaaatgaagctccaagatttttgtaagatgggaattatgtaagaagttaaaaattagtacccaataccatgatcttcagccagtgatggaagtcaataatgc

SEQ ID NO: 4347 - DNA, 458 bp, Gossypium hirsutum
  Clone ID: LIB3493-033-P1-M1-D2
aacggccgagatttactctccactcaactacgatgcaggcgacagtcacttcaacaacaacggcggcaacccggttcatctccatgaagcgttagcagcgttacaacgttacttgccgttgaacgaaccggacgttctctacccggattccgatcttccggttctcgaaaacccggattctccggtcgacgcttactcgtgcgatcatttcaggatgttcgagttcaaaatccggaagtgtccacgtggccgagcccatgactggaccgagtgtccgtacgcacatcccggcgagaaagctcgccggagggatccgaggaagtatcattactccggcactgcttgtgctgatttcaggaaagggaactgccggaaaggcgacgggtgtgagttcgctcacggcgttttcgaatgttggctccacccagctcgttaccggaccgaactgtgtaaagatg

SEQ ID NO: 4348 - DNA, 251 bp, Gossypium hirsutum
  Clone ID: LIB3493-033-P1-M1-D3
cgaccagtggaggcatggcataaggctgcagagagcccgtgttaaaaaaaaatgcagaagagacttgttatgttctttttctatagtgttgtagcgaactgatgatataatatgtttactagatatgcgttgtaactcatgttgtgaagatttcaaaaatttaattagaccagatgaaatgggccaaaagcatgcctctcgtgatgttaaaacacaatagatacaccagatgatgtggttggttaatgttg

SEQ ID NO: 4349 - DNA, 456 bp, Gossypium hirsutum
  unsure (1)..(456): unsure at all n locations; Clone ID: LIB3493-033-P1-M1-D4
gagaagttttcaatctccttaataaatgtcacgcaatggaccanaaaaattgcaggcaatggaatcaccgagaagcatatgtcacgttgtggccgtaccttatcctggtaggggccatgtcaatccgatgatgaacctctgcaagctactttgctctaaaacccccaacattgtcatatcatttgtagtcaccgaagagtggttgggtttcatctcttccgacgacaagcccgtcaacgtccgatttaggacgatccccaacgtaatcccatctgaacttgatagagctaacaacttccctgctttcatagcagctgtgctcaccaagatggaagctccatttgaggatctccttgatcggcttgaactcccagtcgccgccattatagctgacacgtatgtggcttggacggtacgagtggggcaacgaaagaatattccggtggcttccctttg

SEQ ID NO: 4350 - DNA, 468 bp, Gossypium hirsutum
  Clone ID: LIB3493-033-P1-M1-D5
tctttgcatattaccttcagtcactaagcaggggcagggactactgcaaatggcttccaacaaaacctgtgctgtccttacagttttctctcttcttcttttcaacttatcattcaccaatgcttgccattcatgcaagccaccaaagcccattccaccacctgctgcatgccctccaccaccagcaaagcctgcttcttgccctaaggacacattgaagctaggtgtttgtgctgacctgcttggactggtaaacatagtggtgggagcacctccttcgagcaaatgctgtgctttgctccaaggcttggctgatttagaggctgccctttgcctttgcaccgccattaaagccaatgtgcttggggccaacctcaacatccctattacccttagcttactccttagtgcatgtcagaaagaaatccctccaagcttcaaatgttgatatttttttttaagaagcac

SEQ ID NO: 4351 - DNA, 221 bp, Gossypium hirsutum
  Clone ID: LIB3493-033-P1-M1-D6
ccgtccgatccggtcaccacctcgcgatgagaaattaaagggaggcaactctgacactacctacatacttaaattgctctatcggattaccctaacaatagagacctgatactaaacatattcaaactacagattgcaggcctatcaattttgatggatgatgttgatgagttctcggcttctactgttattgcgtgggctcaagtatacaaggggaaacc

SEQ ID NO: 4352 - DNA, 437 bp, Gossypium hirsutum
  Clone ID: LIB3493-033-P1-M1-D8
cagaaaccgaaatggaagttaacggcggcgcagtctccgatcccgaaactatccgttctcagttccttcaactactccgtaccagacgaaatgctcaacttcctttgactgtggaacctgcgaaacctgtggttaagcctttgttccaagacgttaccccgccaaccttcagtgaggcaatggaatcttgtccaaaggctaacattggaaaccttaaggaactgctcaaagaggaaaatctgtatctccatactgaggctggagatcaaggaaaattgcccgtgttgattttaagtacgaaaggaaacaatcaagaaaagaggcctgctgttgtttttctgcatagtactcataagtgcaaagagtggttacgcccattgcttgaggcttatgcttcacggggatatgtaaccattggagtcgattcccgctatcat

SEQ ID NO: 4353 - DNA, 244 bp, Gossypium hirsutum
  unsure (1)..(244): unsure at all n locations; Clone ID: LIB3493-033-P1-M1-D9
cggacgcgtgggtgggagggtcggggtaagggccgatttgattgttcaaagggttnaatttgttctcgagtctgataaaagaagccatctcatggatcttctacatgcacagagggaaaatggaaatcatggaaagcattctttgacattagttttcgtggagactaaaaaaggagccgattcattggaacactggctctgcatgaatggatttctatcaacgaccattaatggtgataggact

SEQ ID NO: 4354 - DNA, 463 bp, Gossypium hirsutum
  unsure (1)..(463): unsure at all n locations; Clone ID: LIB3493-033-P1-M1-E1
gaaaaaggaaagttcaagctaagctaaaactctgaactgggcacttctcagactgctcagggactganaaagattaaacgaaaggaaaagaaaaagacttcttctttttttccctaaaagaaaagtcgatctttttattgttggatcgattctctttagccatttcctttttgcatgtaaatgctctttggtagccttaactcgccacttcgactcacttcaatccatggcttataaccccaacgagtcccccgctgatgatttcctcgagcaaatgctcggactcttccactttgcgcctactgagactggcttagcggggcccgacggtagattgtctggaaacgccacgacggctggagcgccaatgcttctgcaactcagctccggcggtggcaccggacacatcggcgctatangcggcggtggaggcggtgcgtttcacggacaggtttttccattg

SEQ ID NO: 4355 - DNA, 298 bp, Gossypium hirsutum
  unsure (1)..(298): unsure at all n locations; Clone ID: LIB3493-033-P1-M1-E10
gtgccactagttagccttagtgaagtaccggaccactaagccaatctgtaagtgttgatcagcttgcagtaggggagagtgaactgtttggtttctattgccttaaggaggaattgcaagcttatcctgaatgtaatgcttacagagtgggagagtgcggagaaatcttanatgaagttatgaatncttaccctgctggatactttcttgaaccacctgatattgatgatgtngaattttttaagttttccaattaattttatattgtggggggggggggggggtantatttttataa

SEQ ID NO: 4356 - DNA, 185 bp, Gossypium hirsutum
  unsure (1)..(185): unsure at all n locations; Clone ID: LIB3493-033-P1-M1-E11
cccacnncgtccnacnctgnggactcatgttatttttaaaaccaggcaatatnnttctctctttaaaaataacctttnctccttcaaaagagaaaaccctnaagctttnaacaaatgcatggagattatttatatttttctcaatatcaaaaccaaactacctccaaagactaagataccctgtt

SEQ ID NO: 4357 - DNA, 397 bp, Gossypium hirsutum
  unsure (1)..(397): unsure at all n locations; Clone ID: LIB3493-033-P1-M1-E12
atttatcgaatttgttcnggtangggcactgtaagaggctgttaagtatggaanaattgaattggcaaaattttttcggttggctggatttgatgatttagtgcaggactgtgttgctttgctggcatatgaacattcacaggagtcctgtgtgggataccttctagaagagtcgcaacgtgatcttgtggcagacacagttaatgcaatgatattgtcaacaaattcgaacacgcaagatatggaagggtgcttatctttcttatcgtggggggggggggaggaaaattacaacttgtttttttttaaataagtggtttttaaatgtgtttaacttattatataatattttatttcttttttttttattgctccgtgttgtttttaacgagttatg

SEQ ID NO: 4358 - DNA, 255 bp, Gossypium hirsutum
  unsure (1)..(255): unsure at all n locations; Clone ID: LIB3493-033-P1-M1-E2
gtagatacgctggtgaagaaagcctatnacagttggcagcaaatcatagagtatgagggcaantcactgttgaacttcaagcaaaatangaggtcaagtgcccgaaatgaacctcaaacggatgcgataggctaccctaatgctttatatcatcagttgcagttaccagttgctgttccaactgagcaagtgcactcaagcccacaagctggaggatttaattataattagtctaccatatactcgggacaatta

SEQ ID NO: 4359 - DNA, 189 bp, Gossypium hirsutum
  Clone ID: LIB3493-033-P1-M1-E4
ctatcaatcgtcccggtcttcttaatgaacggggtcaaatttccaaagaaaacttttatcacctaaaccatttatctactcctttccaactttcctttattcctcttcttttccatccaatttcaatctgattctcacactctatcatattctttcttactttcagcatatccaaggacactctcaaac

SEQ ID NO: 4360 - DNA, 193 bp, Gossypium hirsutum
  Clone ID: LIB3493-033-P1-M1-E5
caaatctgaaccgtccattttcaccccatatgactcggtctctatccacccatgtccccctctctttttctgccttcacttccccgtctcgcctctcgcttattggttcaagatctgttagttttttctctttttaaatctcttgattcttcttttcttatgaatctgaaatttttttttggggtttttattg

SEQ ID NO: 4361 - DNA, 107 bp, Gossypium hirsutum
  unsure (1)..(107): unsure at all n locations; Clone ID: LIB3493-033-P1-M1-E7
gatggaatggacatganaggatgtcgagcttgtctcttntttacttaggtggattggaaatctnatccantttttattntaacaccaattatttttttttttttaaa

SEQ ID NO: 4362 - DNA, 354 bp, Gossypium hirsutum
  unsure (1)..(354): unsure at all n locations; Clone ID: LIB3493-033-P1-M1-E9
aaaatatcacaaatcttcttctccgtctcaggagatcttagtatcatcactatggcctcaaatcccaaggtcttctttgacatgacgatcggtggtcagcccgctggtcggattgtgatggagcttttcgcagattgcactcctcgcactgcggagaacttccgtgccctctgtactggcgagaaaggcgtcggccgcagcggtaagcccctccactacaaaggctcttctttccatcgtgtgatccctaactntatgtgccaaggaggtgacttcaccgccggaaacggtaccggaggtgaatccatctacggatccaagttcgctgacgagaacttcatcaagaagcacact

SEQ ID NO: 4363 - DNA, 435 bp, Gossypium hirsutum
  unsure (1)..(435): unsure at all n locations; Clone ID: LIB3493-033-P1-M1-F1
cggacgcgtgggttttgggtttgttgtgttgcggaatgatcgtcttcgcctaactgtttctccttcaattnttcagatgtgggctgcttcatgccttgcatcgtgctgtgcggcgtgcgcctgcgatgcgtgccgcacggtggtttcggggataagccggaggtctgcaaggatagcctattgtggactatttgccctttctctgtttgtttcgtggatcctccgtgaggttgccgcccctctcatggagcagctgccttggatcaatcattttcacaaaacacccaacagggaatggtttgaaacagatgcggtgctgagggtcaacttgggaaattttctctttttcactatcctatcatttttaatggatggtgttaaaaatcagagggatcctcgtgatggtttgcaccatggtagatggatgatgaaaat

SEQ ID NO: 4364 - DNA, 389 bp, Gossypium hirsutum
  Clone ID: LIB3493-033-P1-M1-F10
cggacgcgtgggaacaaataccacgattttgtgtggcaacttggatctaaatgtcaccgaagaggtattgaagcaatttttcttgccattaggagaaattgtgtgtgtcaagattcctgccaccaaaggatgcggttatgtactgttcgcgaacaggaattctgctgaagaagccatacggaggatgcaggggcaaatgattggtcaacaagttgtccaaattacttggggtaggatcccaacagcaaatcaggacctacctggtagctggggcgcacaaatagatcctaatcagtggaatgcttattacgggtatggacaaggctatgatgcttactcttacggggctacccaggatccctctctctatgcgtatggtgcatatgccg

SEQ ID NO: 4365 - DNA, 485 bp, Gossypium hirsutum
  Clone ID: LIB3493-033-P1-M1-F11
gtgatgcgaccctctatcatcacgtgtcactggatttaggcttcctctttgtttttttttttttcttttataagtctcaaagaaacttagaccccttcgtattctccgctcataccccaaatccccataccccttctgttcaacagcaaagatggcaactgtgcgagttacctcctctagtatcgttcaagcttcgatcccgaaccgattcacgagtgccattgtcaaggccccgacttctcttggatcttttaagaacatctgcaaaccttttggcttgaaatgttcctccaatcacaaaacatttatggcagcttataagattaagcttgtaggaccggatggtgaggtgagcgagtttgaagcccctgacgatcaatacattttagatgcagccgaggaagcaggagttgaactgccatactcttgccgagctggagcttgctccacatgtgccgggaagatggtgtcgggttcagttgatc

SEQ ID NO: 4366 - DNA, 497 bp, Gossypium hirsutum
  unsure (1)..(497): unsure at all n locations; Clone ID: LIB3493-033-P1-M1-F2
gcaaattacagagaagcattanttgaggctgagtgaagatgaggctgaaggtgctgacattctattggtcaagcctggtctcccttatttggatatcataagacttctcagggatcaatctcctttgcctattgctgcctaccaggtttcaggtgaatactccatgatcaaagctggtggtgttctcaaaatgattgatgaagaaagggtcatgatggaatccttgatgtgtctccgccgagctggtgccgacattatccttacatattttgctctacaagctgcaaggtctttatgtggtgagaagaggtgaacttggtctgattttccttctatgaagctttggttgattctgcaaaaaaggcttgagacactaaatcttccattcgagagtgctagttgttagaacgatgaggagtcctttagaatgcttgagttagctgttcgtagtccgcatcttcataagcctcaagtacataaaaataaaactaaaatgc

SEQ ID NO: 4367 - DNA, 298 bp, Gossypium hirsutum
  Clone ID: LIB3493-033-P1-M1-F3
gttatctctgagggtgtcttaataaacgcctgcgattgactttcggtttccattgacttctttatttctacgtttttgaatttttagtaagcgaaaatgagagagtgcatttcagttcacatcggtcaggctggtatccaagtctgaaatgcctgctgggagctatactgccttgaacatggaatccagcctgatggccagatgccaagtgacaagactgtcggaggaggtgatgatgcttttaacacctttttcagtgaaactgttgctggaaagcacgtgcgtggggctttttttt

SEQ ID NO: 4368 - DNA, 396 bp, Gossypium hirsutum
  unsure (1)..(396): unsure at all n locations; Clone ID: LIB3493-033-P1-M1-F4
gcaagatctatcagatggaatgtatctgccagtggtncgtcccctaacccacagggatcatttagatatggttcaatcaatgtgactgaaatttttgtgctaaaaaacaagccaccggtaactattgatgggaaaagactaacaactctcagtgggatatcgtttgtcaatcctgctacacctatccggcttgctgaccagttcaaggttaagggagtatataagtttgattttccaagtagaccacttacagggccacctaaaatggagacatcgttaatcaatggaacatttaggggatttatggaagtcatnctacagaacaatgacaccaaggtgcagacctatcacctgagcggatatgccattttttgtgtcggaatggattatggtgag

SEQ ID NO: 4369 - DNA, 410 bp, Gossypium hirsutum
  Clone ID: LIB3493-033-P1-M1-F5
ctgacacgtgggcacgaaaaatgacacataggcgccggcgtagctgcaacattgtcaagattgatgataacgcactctggaggggagatcgctgaagtccaacgaggtcacatcgctcggtcaactgtaaggacataccctcacactaaatgttgtgctgacaaacgatctcctgactgccatgttcatatctcaaatcacacccacatgcacctatacgacgacaaataccgactcgtgtgcgaccgatctatcatcactaagcgatgcatgttccttacagacgagactgtcatagacaatctcactgtattaccttacatggatccttcactggatgctacacacgatatggtggctgtagctgggccccaactagaccaagacgcgaccaccgcggccgtcaatga

SEQ ID NO: 4370 - DNA, 488 bp, Gossypium hirsutum
  unsure (1)..(488): unsure at all n locations; Clone ID: LIB3493-033-P1-M1-F6
ggacaagtggaaaactccttgcaaccactctgctctggacattcacccctggtgcttccatgccttcaaaagaagttttggttgccacattttccaggtttgggcccttgaaggaatcagaggttcagatacttaaagattctagtaatgcccatgttgtttttatgcgtaacgaagatgctgcanaagcattgcggagtttagaggagagcaatcctttcggtgcaacccttacgaattatcagcttcagaataacaatattctaaccactcatcaacacatggagggattccggctgcctgcaaagcttaccggtgcaatgcctcgcctcggtgacgcacctcccattgacgttataaagaagaatctagagatgatgacatcaatgcttgagaaatcgggggataatctgtctccggagatgaaggcaaagctggagagcgagataaaaggactactgaagaaggtcagccattgtcctggatcc

SEQ ID NO: 4371 - DNA, 474 bp, Gossypium hirsutum
  Clone ID: LIB3493-033-P1-M1-F7
ctgctaaatactatttattttcagtgtttccgtcctgtcttctgatatgtttttttgttgttttcaaattttgaatcacagcaacactgtgtagagattttcgatttttttttttatttcgtctctctccttttgtttttttttctccgttaaaactcactcctttgtttccttctcttttcttcactcaaaaaagtgtacggagaatggacggaggaacactgcatagcctcagaacagtagaggaagtctttagggatttcaaaggccgccgtgcaggaatcatcaaagccttaaccgccgatgttggagaaatttttgaacagtgcgatcctgagaagggagaatcttgcttgtgtggacttcctactgaacagtgggaagttactttacctgcagaggaagtgcctcctgagctttcggagcccgcattgggtattaactttgctagagacgggatgcaagaaaaggact

SEQ ID NO: 4372 - DNA, 549 bp, Gossypium hirsutum
  unsure (1)..(549): unsure at all n locations; Clone ID: LIB3493-033-P1-M1-F8
ctcacgcatactgtttattattcaggatctagtccaatcttataagagggttttttnttgatttcaaattttgaatcacagcaacactgtgtagagattttcgatttttttttttatttcgggtgtctccttttgtttttttttctccgttaaaactcactcctttgtttccttctcttttcttcactcaaaaaagtgtactgagaatggacggaggaacactgcatagcctcagaacagtagaggaagtctttagggattttaaaggccgccgtgcaggaatcatcaaagccttaaccgccgatgtttgagaattttttgaacagtgcgatcctgataaggaaaatctttgcttgtgtggactttctactgaacagtgggaaatttttttaattgcagaggaagtgccttctgagctttctgagtccacattgggtataaaatttgctaaaaaaccggattcaagaaaaaaactggttgggacttgttgttgttataattatgcttggttacaacaatgggttattatttttgtcttggtttggtttt

SEQ ID NO: 4373 - DNA, 490 bp, Gossypium hirsutum
  Clone ID: LIB3493-033-P1-M1-F9
ctgacgagtcgaaaactttggaggatgctgaggaagcaatgttggaactgtactgtgagagatcgcaattaaaagatggccaaacagttcttgatgtggggtgtggatggggttcactttctctatacattgcccgtaagtaccccaattgcagggttacagggatttgcaattccaccactcagaaagcttttatagaggaacaataccgggatcggcaattgcaaaatgtggagatcattgttgcggacataagcacatttgaaatggaggcatcatacgacaggatatattcgattgaaatgtttgagcatatgaagaactatcacgatcttctcaagaagatatcaaagtggatgaaagaagatagtcctcctttttgttcattatttctgccataaagcatttgcttaccactttgaggacataaatgaagatgactggataaccagggtccttctttacaggggggaaaatgcctttagctaat

SEQ ID NO: 4374 - DNA, 144 bp, Gossypium hirsutum
  unsure (1)..(144): unsure at all n locations; Clone ID: LIB3493-033-P1-M1-G1
tccggggatgcaataaagtgcaaccagtanccagaaagcagaaaaaaacaggtgaaggataattgatcgtttaacaggccggagaaaaaaggctgggaaagcttgctctttgagcatcgtcgactgaagagaacgaaagaagag

SEQ ID NO: 4375 - DNA, 517 bp, Gossypium hirsutum
  Clone ID: LIB3493-033-P1-M1-G10
caaataccagccaaacatcgtcgtgtgtctagactcttctctggtaagggcatcgaaagatcaaatcaagatccctgccaaaatgaacgacgctgatgtatccaagcagatccagcagatggtgagattcatccgccaggaagcggaggaaaaggctaacgagatctctgtttccgctgaagaggagttcaacatcgagaagcttcaattggtggaagcggagaagaagaagattaggcaggagtacgagaagaaggagaagcaagttgaaatccgaaagaaaattgagtattcgatgcagcttaatgcatctaggatcaaggtccttcaggctcaagatgatgtggttaatgcaatgaaagaatcagcatccaaggaccttctcaatgtgagccatgatcaccatgtttacaaaaggcttttgaaagatctaatttgtcatagtttagttagactgaaagaccctggaatcctactccgatgattgaaacgagtacttcatttgattgtacgcttc

SEQ ID NO: 4376 - DNA, 471 bp, Gossypium hirsutum
  unsure (1)..(471): unsure at all n locations; Clone ID: LIB3493-033-P1-M1-G11
cagtattggtgtgtgccacagggacataaaggcacaaaatttattggtcaacccgcacactcatcagctaaaactgtgtgattttggaagtgccaaagttttggtgaaaggggaaccaaacatatcttacatctgttctaggtactatcgagcacctgaattaatatttggtgcaactgaatacaccacagccattgacatctggtctgctggctgtgttttggctgagctattgcttgggcagcctctgtttcctggtgagagtggagtagaccagcttgttgaaattattaaggttctaggtaccccaacaagagaagaaatcaagtgcatgaatcctaactacacagagttcaaattcccccaaattaaagctcacccatggcacangatatttcataagcgtatgcctccggaagctgtggatcttgtttcacgactattgcagtactctccaaatctgcgtagcac

SEQ ID NO: 4377 - DNA, 426 bp, Gossypium hirsutum
  unsure (1)..(426): unsure at all n locations; Clone ID: LIB3493-033-P1-M1-G12
aaaagaatgaaccaaccctctttcgtaatctgaaatctgacaagaatgtggattatagaactgggttttatttgtttaaaaaaaatagtgtggaaagtgagagtctttttttattttctttgatcttnttttattattttggaacagagatggtaagtggtgaatgtatcctgcaggtgtatacaacacagagattgccatatagtctgctggctgagggtatgctgagctattgcttgggcagcctctgtttccttgccatagtggagtggccgggtgggtgaaattattaacgttctaagttctcctacaagagaagtaatttaaggcatgaattctaactactcagagtttagattcctccaaatttaagcttacccatggattatgttttttcataatcgtatgccttcaggtatctgtgga

SEQ ID NO: 4378 - DNA, 412 bp, Gossypium hirsutum
  unsure (1)..(412): unsure at all n locations; Clone ID: LIB3493-033-P1-M1-G2
cttattttataatattcccagaggttgtgaagttaggcgacttaatttcaaataaaaatccacccnaatcacttatcgttttctcaaatcccaatcaaaacgatagaggtcggagattcgaggaaagacaatccanataaaaatatttttncctattaaacaaaaagcttaaatcaaaccccaaaatctagaatcccacatcctctaaatccccaaaacgggaaaaaaagaataaagaagacatgaggacacagaagaggccgatccatgcggtttcgatgtgggtgagacgacagccgccgaaggtgaaggcttttttggcggtggtatcggggatggcggcattggttcttcttcgattcattgttaatgaccactaccacctcttttgttctctctaggctgtacattt

SEQ ID NO: 4379 - DNA, 230 bp, Gossypium hirsutum
  Clone ID: LIB3493-033-P1-M1-G3
atttgattctccctccatcttccaatcttttgagttcccttcctattacaaatcaggtttccattccaaaccctaccaaacttttaacaaaaaaacaccccttcttcatcgttttaaactcctccatcgttttctctacttcctttccttcttctcctttccaataactatcccccccccaaaacctttaacaaaaaaacacccttttttttatacccaattccaattta

SEQ ID NO: 4380 - DNA, 249 bp, Gossypium hirsutum
  unsure (1)..(249): unsure at all n locations; Clone ID: LIB3493-033-P1-M1-G4
tgccatcctccgtcttgaccttgcangtcntgatctagccgataccttgatgaagattcttaccnanagaagttacatgttcaccaccactgctgaacgggaaattgtccgtgacatgaaggagaagcttgcttatgtttttccttactatgatcatgaactgaaaactgctaacagcatctcatttgttgagaagaacttttattcgccttaccgacatttcctttctatattttttctcctaatatt

SEQ ID NO: 4381 - DNA, 385 bp, Gossypium hirsutum
  Clone ID: LIB3493-033-P1-M1-G5
tgttgctgttttttaggctgtaaaatcaacagtgaacagcagcaacaacaagccatatcaatgccctctaactagacttgtatgataatacaacaaggtggataagcaacaagcaaagcgatagaactggcagatgctgggataagttaaaggtaaccaactactactgatcatatatttgataagaatcgatcggaagtggcatatcctgactgtttaacgtgcatgacgaacggctctaaccatctttgatcatcatcatcgctcgtaaaacccctgaaaccgtgccaatgtaacaggtccgattcttggctagcaaccatgtgagacccatcagctggcaatctttaacttatcccagcatctgccagttctatcgctttgc

SEQ ID NO: 4382 - DNA, 408 bp, Gossypium hirsutum
  Clone ID: LIB3493-033-P1-M1-G7
ccgaatcatatcgctctccagcttcagaccacccacacccatcctctctgcacgtcatgaccgcccgcctccccaaacactccatcacttctctcattctgatcaaagagagagatatgagaccaggtcacggtgatgaaatatgacgaccgaacacgactgttctttctcttcacaagcgcacgttacgaccttcacttccgttacctcaattacactctcccgctccaaccttggcgtcatgacttcagacttccgactcttgcctcgcccacttcaactcgaccctattgaattccagttggccgagtcatatctcgcggtacctgctccactctggcactccctattgaaatctctatgtgcctcttcttcttcgtcctccttctcttctatcaacttagcata

SEQ ID NO: 4383 - DNA, 250 bp, Gossypium hirsutum
  unsure (1)..(250): unsure at all n locations; Clone ID: LIB3493-033-P1-M1-G8
ggctttcaagacaagcttatttgatctttgtagttccgacaaaagagaacgaaaaaaaagaagaagaaatacaatcgttttctttttgaagtcgggttttagtttttggggtcaaaaaaatgttgggagtatttatcagtgcgatagtgtgtnngccagacgagctggtggcggtcagttgacgaactgcatgacctaacataacagggggctctatggtacaatggacactcgagactagctgattacg

SEQ ID NO: 4384 - DNA, 153 bp, Gossypium hirsutum
  unsure (1)..(153): unsure at all n locations; Clone ID: LIB3493-033-P1-M1-G9
gaacagtctgtttggctatctatcgttccttgtcattattaaatggtgcgctggttcacaanctnatttntaccacatattgatatacatgttcctgagtcctactgatgagctgggtgaaaatcagctttttcctttttttaaanataactc

SEQ ID NO: 4385 - DNA, 470 bp, Gossypium hirsutum
  unsure (1)..(470): unsure at all n locations; Clone ID: LIB3493-033-P1-M1-H1
ctccaagtgtgcggtcaaacaaatctcagaaccaggttcaagtcgaattgagccctgncagctaaatctcaccagaatacaattacttgagccagcctgagcaggaatacttcgataccatgggtttcgtagaagagaagccactggtcaatcagtttgcatatgtggaccctgttcctacgtctatagatgctggatttaatcaatcagataatgcccncttgtacttcaattcggaccagggaagtaactccatcaattgttccgactatggctggggagaacagggtgccagaactcctgaaatatcatccattcttgaagcttctgtagtgggtgaagagtttcttgaggatgctaaccctagcaagaagctgaaaccaagttctgacaatgttatgcatgctgaagagaanctccgcaagaccttgtcngacgagctgttggctttggacaaccagatgaaatac

SEQ ID NO: 4386 - DNA, 477 bp, Gossypium hirsutum
  Clone ID: LIB3493-033-P1-M1-H10
cggacgcgtgggtttgaattgcgtgactgagtgatctaatggagtctaaaggtgggaaaaagaagtccagtagtaggaagtctttattctacgaagctcctctcggttacagcattgaagacgttcgaccaaacggtggaatcaagaagttcagatctgctgcttactccaactgcgctcgcaagccatcctgatatactcacaagcgtgccgtctgaccactagtagtggttaataaaactgttatttgctttgttagttagttttagattatttccccgaccaacttcttcctcttctctcttcgtggctggtttctttacattgcgttctcctgatttggcgactttttaattcggataaagtttgcagtccttggttgaattacaatggcagtgtctgcaattggatttgagggttatgaaaaaaggcttgaaattttctttttttgagcccgggctctttgcttgattctgt

SEQ ID NO: 4387 - DNA, 443 bp, Gossypium hirsutum
  unsure (1)..(443): unsure at all n locations; Clone ID: LIB3493-033-P1-M1-H11
taccaatcagtctgctccagctggagctgccgaagcatctaagatacaagacccaaaatcacatgtttctggttctggccctgagttgaggagaacatcttcttttgacagaacatgggaagagactgttgcagaatcagtggctaatgaacttgtcctacaggctcattcttccagcgtttcttccactaaaagtggaccacttgtttccactgagcaacaagatgaatcctctaaaaataaaatgaaagacacaaaatctgttaagtctggtcgatcatctcangaagagaagaaggttggaaaatccaatgaagagaaaaaatctaggcctcggaaaatgatggaatttcacaatatcaagataagtcaagttgaactactagttacatatgaagggtccagatttggtgtaaatgatcttaagttgctgatggatacat

SEQ ID NO: 4388 - DNA, 456 bp, Gossypium hirsutum
  Clone ID: LIB3493-033-P1-M1-H12
ggggcatctgattatctctacgccgctttgaagacgatagatatttaagattatgtaagctaaacaagtcaaatccggaaacgtaaactgaatgagcctcttaaaaactggggttctacaatcaacgcttccatttgcttcgctttattccaccacagtcttccaatgtctccccatctaccttttgggtgcaaaatctgaccaacaataacaccaccaaccactcatcgttatcttattatactcccaggattaatcctgtaatagccaaggcactgcgtactgaagcatctgccacagtacagcccataaaaatggtgaaagctatcagggttcatcaatttggtggatctcaggtccttaaatgggaggatgtggaacttggggaacccaaagagggtgagatacgtattaaaaatatagctattggagtgaatttcatcgatatctattttc

SEQ ID NO: 4389 - DNA, 453 bp, Gossypium hirsutum
  unsure (1)..(453): unsure at all n locations; Clone ID: LIB3493-033-P1-M1-H2
ccttgcttaccttgatgggtgcctacagagaggaacttgactataccgtgctgtccaacttgattagtataacatacaaagttgggaggatngcagctgatgcaagacctgagctaatggataacatcaatcaatttttcattaacattttccaatattctgctgaaaagctcggttgggatgctacacaaggtgagagtcatctggattcaatgttgagaggagaaattttgactgcgcttgctatgcttggacacaaggagacattgagtgaagcaagcagacgatttgatgcattcttgaaagacagaaacacaccactccttcccccagacacaagaaaggcagcatatgtagctgtcatgcagacagtcacctcctccaatagagctggttttgactctcttttgaaagtttatagagagactgatttaagccaggagaaaatccgca

SEQ ID NO: 4390 - DNA, 470 bp, Gossypium hirsutum
  Clone ID: LIB3493-033-P1-M1-H3
ttatgcttgacaatcagggcttccatggaggggaaaaggtccatctttctcccaacatctaatctctgcaatcttctcgttcttgttttcttctgttttgctgcttgtccttcacttggtcgcctctctttcaacttctatgcaacatcatgtcccgctgcagagttgatggtgagcaacactgtaagggcagcttcctccaatgatccaaccatccccgggaaactacttcgcctgttgttccatgactgtttcgtggagggttgtgatgcatcagtactattacaaggaaatgggacagagcgaagtgatccagctaatacctctctcggaggattttcagttatcgattcagccaaaagggtgctcgaaatcttctgccctggaaccgtttcttgtgctgatattattgctttggctgcaagagatgcagttgcaattgcgggcggacctgcatttcaaattccatc

SEQ ID NO: 4391 - DNA, 454 bp, Gossypium hirsutum
  Clone ID: LIB3493-033-P1-M1-H4
cggagctggtgtcttctattgcatcctcagagatttatagagatagtctttttgatcgcttattgttagttctacatgggttgttaagcagttgccagccaagttggctaaggtcaaagactgccaatgatttttctggatttgaccgtgaggcattggagagtttccagaatgaattagattctatgcaactacctgagatgattagatggcgtattcaggcagcgatgccaatattatttccttctttccgcaatgtgatctcctgccacacaccttcggtcccagttggtgctcttagtgcgcttcaatccagcatctacatccctgaatcttgcaatggtaccttaaatgcacctcagagacaggttgcatcggcacgaactgcaaataacataccgggaaaagccaagtcaatgccttcactacaggagtacgatatggaaatcgaccc

SEQ ID NO: 4392 - DNA, 227 bp, Gossypium hirsutum
  Clone ID: LIB3493-033-P1-M1-H5
acggacgcgtggggtcattgttatgttatgtgggctctgggtacttgctttacttggagaaatccaggcatcaagcccttctcaaaaacaaagacaaggcaaccatggaaatggaatggtactgaaaacttatccaacctcaagctttgttttgtctttaaccttttgtattaattggttttgcaatgtaaaatgcagtatggtgccacccaagggagccttcgtcc

SEQ ID NO: 4393 - DNA, 465 bp, Gossypium hirsutum
  unsure (1)..(465): unsure at all n locations; Clone ID: LIB3493-033-P1-M1-H6
cactaccactactattggagctggtacgcctgcagtaccatccgatcccacctcctctgctatctatttaaaaaaatggagttattacaaggatattgaccttcatagcaaatttaactattgtccgagatctcttccatcatatgcatgagtcttccgccctcaaattcattttgacagcctacacagattagtccgactgaaacagcaatgattacaaaagcctgctctctcaagcattacagacgattcataggatcaatgtcggaggccctacacttacaccagatactgatactttgttaagaacatggcttcctgatgatagttatctgaccaattcangcattgcaaagaataatcaagttctctcaagtaggcctaattatgttaatgttaccgaattattgcaccagatctagtatacaagactttcaaagagatggcatcaaacgactccaatat

SEQ ID NO: 4394 - DNA, 413 bp, Gossypium hirsutum
  unsure (1)..(413): unsure at all n locations; Clone ID: LIB3493-033-P1-M1-H7
cagaagcagaagcaaagggtttagagacgaaatggcaacgaanaggaagactcccgtcaagaccaaaaacccggatctgatccgtggtgtgggaaagtattccaggtctaagatgtaccacaagcggggcctttgggcaatcaaagccaaaaatggcggtgctttcccccgccatgatcccaaacctaaggcccccgctgccgctgagaaacctcccaagttttacccggctgaggatgtcaagaaaccgctccttaacaagcgcaaacctaaacccaccaaactcagagcaagcattacaccagggactgggttgattttgttggctggaaagtttatggggaaaagagttgtttttttgaagaaacttacttttgggcttccttttggtnacccggaccattcaagatcaa

SEQ ID NO: 4395 - DNA, 290 bp, Gossypium hirsutum
  unsure (1)..(290): unsure at all n locations; Clone ID: LIB3493-033-P1-M1-H8
catacannagttannagcgtatnnntcatgaataccaangnnagacagcnntgctganacaattnnttgggtgcgaaaatctataggtacccaagannagttaaaggggagatnngagtcctgnnagctgccggaaaaatacttanncttccccggaccatnntatgattggaagggannaagcatttgccacaatatacccaaatgctaaacgtatagttcaaaattggtgaattgatgttgggtgcagtanttcaacaaatggatcctgaaagtcaaatagcttattt

SEQ ID NO: 4396 - DNA, 293 bp, Gossypium hirsutum
  unsure (1)..(293): unsure at all n locations; Clone ID: LIB3493-033-P1-M1-H9
aaaggctggaaagggatcagcaacagtatcaagtgcctatgctggtgcaatttttgctgatgcttgccttaagggactgaatggtgttcctgatgtcgtggaatgttcatttgtacagtcaactgtcactgaacttnccttctttgcttctaaggtaaggcttggaaagaatggtgtggaggaaggtacngnatacttcttctgaacattttttgtgctatattataggtcacaagaatcttttaggggattttttctttatcctttttatttgggggggggggggggggggt

SEQ ID NO: 4397 - DNA, 318 bp, Gossypium hirsutum
  Clone ID: LIB3493-034-P1-M1-A1
atctgctcctctcttagtttccctttttgtgccttgtgtatttgatacttccccctcatggccgccgctgatgtcgagttccggtgcttcgtcggagggctcgcatgggccaccgacgaccgggcccttgaagaagccttcagtgcgtttggtgaaatcgtcgaatcgaagatcattaatgatcgtgagactggaagatcccgaggctttggattcgttactttccgtgacgagaaagctatgagggacgcgatcgaaggaatgaacggtcaaaatcttgatggaaggaacataactgtcaacgaagcccaatcgcgc

SEQ ID NO: 4398 - DNA, 519 bp, Gossypium hirsutum
  unsure (1)..(519): unsure at all n locations; Clone ID: LIB3493-034-P1-M1-A11
cgnntccgcggacgccccgtgggttcgngnntagctgcgcgcgcggttcngnngttcttagctgcgcgcaagcgccgnngtggcagcttccaaagttccttccgacccaacctgatnngccttttaaactttaatnnaccctcnncgtaatgngnnaataacgngnncgtcgcngnngatgaaatcatannaaggacncnntcatcanacngnnccgacnncacnngtcngacnngagngtcntnncccttngnnttgatanaccgcgnnnacaaccgcncnngccgccattcgtcctttccaacagaaattggtcattagtnnttcgccgaaggggannagttcaagaaaaaagcgacactgtnntttgatgttnngcactgtgcgtatcaaagccgttaaagaaaatcaatccaggcctacgtaacacgtgctggtggctccgtcgtcgaggtacggctaccgttcccggtaaattcagaggaagaaatcatttccgagttcaaaaaatcaatcacg

SEQ ID NO: 4399 - DNA, 580 bp, Gossypium hirsutum
  unsure (1)..(580): unsure at all n locations; Clone ID: LIB3493-034-P1-M1-A12
cgtnnccgattcaaagttctggtgccgnntcatacgacgagcgcagaggcggcnccaactnnntggagttnnntcttgcncacgnnngttaatgggcnnattctcttttanntgggcattnnggatcagnntgactggcttatcncnnacttgcatnncagctgctnnngttcgggtgggcttcttttaagacnntgtgnngagaannnatgacnnttgngtangcntcttttaaagggtnnngcatgcnncctanatnntgtgggnnngaggagggtatnnnttgcatttttgtgnnnaatcagannaaaattcaatggggttcnncccccagaaagaggcagannttgtcatgnntctgtgattgggcactttctagagtnnttcgtgccaaagaaactgagcannatctgtattctttagacttggnnngagaaagtggggtattatgggggtcgtatatattcnntcgtctcaacgaaaaagggtaagaagtcggaggggtgggatgtgaagcctttcttgcaatgccgtaccacanacgtaacttgttaaataagaaagcacccgattcttttct

SEQ ID NO: 4400 - DNA, 440 bp, Gossypium hirsutum
  Clone ID: LIB3493-034-P1-M1-A2
tttacaactctcaaatttgtctgcaaagcttggaatgagaagtcagtaatgttgggcgctttaaggagaaaagttgcgagcggacgctcatcagcttcgatattaggaaagtcattacaggcgattcggcctggtgtttcggcttccagagtttcttctaatgctggaaaagagatgctatcagttcaactgagagggatcgctcatgtttggaacttctctcatcttgttctgcctggatgttctgctggtttaacaaaaacaagagatgccatttgtatcatccaaccggaggctatcatgcaaacatcatgcagggctttctcttctggagatggggatctcgttgatgcttgtgtcccatttatgggagaatcaatcagtgacggaactttggcaacattcttgaaaaaaccaggtgatagagtaaaagcggatga

SEQ ID NO: 4401 - DNA, 439 bp, Gossypium hirsutum
  Clone ID: LIB3493-034-P1-M1-A3
gtccaagaacccgtcttttgtaagttacaaagatgagagagcttggtatcataattattctgcaagcaagttaaatatgattgttttcccatttgtggttaaacaaaatcaaaatctttaagcaaggaatcagttcgaaggtggtggaaaaattatattcgacaaaagcttttcccgcaaaggtttgattcttatagataagtttcaatgcccaacaacaagtctaaacccagaccaagccgaatgtctgtttacctttacattcccaatattattgggtatataagaattctgttgaattgctatgcttttgctatatgcttttccagcaaaagactttttgctgctctgtattttctaagctttgtttgtgatgctgtggatggttggtgtgctcgcaaattcaaccaagcttcaacatttggagctgtcctggaca

SEQ ID NO: 4402 - DNA, 480 bp, Gossypium hirsutum
  Clone ID: LIB3493-034-P1-M1-A4
tttagtttctgcatcatcatatccacttcactgtgttgctacactgtctatacactgaattactggtatggaataacatgctttgatgcgaaatttccaatatacaatcatgataaattgtattaatcatcacatcctgctcagcaaaatgtattttgcctaaaacaagtaaaaaagatgtgcacatgtataattgtgagaagttttacttgatgttcccacatgacctagcaaatttttacttttctcatggaatgggtattaaggtgacaatcaaaacacacaataatgaaccttaaatgatggtcatgtgtaggttagatattcgtatgcttattattgctgtgaacaaagaaactggtcctggcaggtttgtcagttgatggagatttacaaggagttgaacgtctttatggtgctatttctgctcatatgtggcctggaatggttctgaaatctggtgatatgataactgaacct

SEQ ID NO: 4403 - DNA, 449 bp, Gossypium hirsutum
  Clone ID: LIB3493-034-P1-M1-A5
taaaatctaagaagaaagagatagcaattggggtcaggtatctcatacaaggaatgaaattgaattaatggctcaaaccatgttgctcatgtctagccatgcagtgagcttgaagagagatcaccctttactccatttccaagctcaaggactcaagcctaaacctgcctctcatctcttcttcaatccattgtctaatggtgtccatacttcacccaaagctttcaccactttagctgtctttaaatcaaagaccaaagcagctcccaagagggttgagccaaagccaaaggttgaagatgggatctttggcacctctggagggattggttttaccaagcaaaatgagctctttgtgggacgtgttgccatgcttggttttgctgcatcattgctaggcgaagcaataacagggaaaggaatcctagcacagctgaatttggagactg

SEQ ID NO: 4404 - DNA, 387 bp, Gossypium hirsutum
  unsure (1)..(387): unsure at all n locations; Clone ID: LIB3493-034-P1-M1-A6
cattgaatgaagatgacgatgatgatgatttggatgatgtggaccaggaggagctgaacacncancatctggttttggctcaatttgataaggtaacacgtacaaagagccgatggaaatgcaccctgaaggatggcatcatgcatataaacaataaggacattctctttaataaggcaacaggcgaatttgacttctgattttgttagagaaatgtctactttgccatattatattgcagcagttacttttaaagagagagtcaaggggtattactgggtatttcgtaaattttctttaattgaaattaaagtgagagcttgattgacggtcatgggattnctttatttttaatggctttcataagactttcgtttgatgaattgt

SEQ ID NO: 4405 - DNA, 368 bp, Gossypium hirsutum
  Clone ID: LIB3493-034-P1-M1-A7
ggaaattcgagggggaaatgctcgcggcctgtggtaaggatcccgaacgttgcatgaaagctgtgtgtgctctctaccggcaacaaacatcaggggagaaactttccaaggcagccttgtgccaaaatcagagaggttttaataaaatcgacgcctacaggggctgtacgttggcagagtttctgactgatggtgatccgcaaggtgatttaatgaaatccgtgaaggaattggaagcatatgatcggaatgcagtcgagttgtgtagaaatttggcaacaaaatattctaagcaattgtttgagatctacaaaagcaaagaggatccgtattttcttcctccttaaagttctctgcaagtaattgat

SEQ ID NO: 4406 - DNA, 437 bp, Gossypium hirsutum
  Clone ID: LIB3493-034-P1-M1-A8
cggacgcgtgggcaaagttccagttgacgttgcttctccttctgatgatgctgagcaacttcggaaagcttttgaaggctggggtacgaacgagcaattgattatcgacatattggctcacaggaatgcagcacagcgcaattcaattcggaaagtttatggtgaagcttatggtgaagatcttctcaagtgtttggagaaggaacttacaagtgatttcgagcgggctgtgctgctttttacgttggaccctgcagagcgagatgctcatctggctaatgaagctacaaagaagttcacatcaagcaattggattctcatggagatagcttgcaataggtcttcgcatgaactactcaatgtgaaaaaagcgtatcatgctcgttataagaaaatccttgaaagagatgtcgctcaccacactacccgagagtact

SEQ ID NO: 4407 - DNA, 472 bp, Gossypium hirsutum
  Clone ID: LIB3493-034-P1-M1-A9
ctgttgctgagacctctgcattactagagcagaaatgggataagatcttttttacaggtggcgcaagagttgggcgcattgtgatggctgcagcagcaaagaaccttacaccagtaactcttgaacttggaggaaagtgcccggctgttgttgattccaatgttaatttacaagttacgtcaaggaggattgtagccggcaagtgggtatgcaacaacggacaagcttgcatcagtgttgattatatcataacaacaaaagaacttgccccaaagttgatagcaactctagtgagtgtagtggaggaaatcttcggaaaagatctaatggaatcaaaggaacgatcccgcattataaactcattccacttcaaacgtctagtaaatctcttggaagaggataaggtctccaacaaaattgttttcggaggccaaagggaggagagccaattacaaatagcttcaacaatatt

SEQ ID NO: 4408 - DNA, 465 bp, Gossypium hirsutum
  Clone ID: LIB3493-034-P1-M1-B1
cggacgcgtggggccgccctttttttttttggttgggttattttatttttcatcacgcaaccggattgtttatttgcacgagtaataaaaacgaagtacttcccatgaggggagttcctgagtacaagaataggtttttacccttcgtttacctggcgtagcatctggagagcctgacaactactggaagaggggattggctggagaatcggaaatggtcatggagtcaatatatggaacgatgcatggatcccgggagctttgattaatagcatgtgcttagcttacgttaccgtgctcgtcgagcggcagatgttcgaaacaagagtaccgagctgaagcatacaggttatatcaaaagacaacctcaccatgtgtaccttggttcaaatcttctgttatagcactaaaagataaggatacttgatctaaattttttggttccttgccatgttttttgtcatg

SEQ ID NO: 4409 - DNA, 387 bp, Gossypium hirsutum
  Clone ID: LIB3493-034-P1-M1-B10
tgtgtttcaggatcactgcaagatccgcttaggtccctctctgtgcttgcataccttccttaccttttgtcactgaatttttgcaggccccgtcctcccaccccatccctgttcttcaactaatagggttttctctttataaacacccacattccactctcatacatatattaataatataaccctaagtgaatttttcatctttctgttgctgcatagtcttcctcattgggacaaaatagatcatttatcaaagggtttacaggaacctactcaaggggaataaagatcaaagaaaatggcatcttcaagctattcaaacccaccatgtgcagcctgcaaatgtttgagaaagaaatgcatgccagattgtatatttgcacccta

SEQ ID NO: 4410 - DNA, 411 bp, Gossypium hirsutum
  Clone ID: LIB3493-034-P1-M1-B11
gtgttttgggattggtttcatcttgagcacgattgctatatttgatggatccctagctgctattccttttggtacaatggtggtggtttttgtaatttgggctttcatttcattccccctggctcttcttggtacagttgttgggagaaactggagtggtgctccaaataatccatgccgcgtgaagaccattcctcgcccaattccggagaagaaatggtatcttacaccctctgtggtctccttgatgggaggacttctgccgtttggcagcatatttattgaaatgtatttcgtcttcacatccttctggaattacaaggtttattatgtctatggatttatgctgcttgtgttcctgattctcgtcattgtaaacggtctgtgtgacaattgtggggacatattttt

SEQ ID NO: 4411 - DNA, 467 bp, Gossypium hirsutum
  Clone ID: LIB3493-034-P1-M1-B12
agagagatggcgtctgtaataaaatctgcaatcttaattctgtcggtgtttttatctgtacgcttcagttcgggtgttaggttgctccaggaacagcccaatgatgaccccaaaaacatggacgctattcctcccattgatgcactcaaccctaccgagttgaatggacccggtgttggcattcacgaagatcatgttgtcccaaaaggtgctgaaattggtactcttggttttggttttgaaggtggtcctgataaatgttgttcttctggatgttccggtaattgtaatcctggtggtttcgttctaccatttcctcaaattccagaaatcccaagaattccagaaatcccacaaatcccacagatcccacaaatcccacaaattccactaatcccacagatcccacaagtcccacagatcccacaagtcccaaaaatcccactaatgccaggacaagtcggatg

SEQ ID NO: 4412 - DNA, 454 bp, Gossypium hirsutum
  Clone ID: LIB3493-034-P1-M1-B2
atttttcctgcattttctccctcgccaaacagaaatggtagttcatttctagacgcagggaacgatggagaaagcgatcaaccgacagcaagttttgcttcaacaccttaatccttcagcttcttctttttcgtcgcaccaaaacaactctgccctctctgcatcggcttgtttagctggagatagcgctgcttatcaaagaactaatgtatttggagatgatgtggtgatagtagcagcatataggaccgcgctttgcaaatccaagcgagggggtttcaaggatacttatcctgatgatttacttgcacctgttttaagggcagtgatagagaaaacacatttgaatcctagtgaagttggggatattgttgtgggaacggtcttggcaccaggatctcaacgagctagcgaatgtcggatggctgcattctatgctggctttcctgaaact

SEQ ID NO: 4413 - DNA, 505 bp, Gossypium hirsutum
  unsure (1)..(505): unsure at all n locations; Clone ID: LIB3493-034-P1-M1-B3
cggacgcgtgggcggacgcgtgggcttttttgcttagccttttaaaaaacatagaagatggtaaaggttccttttgttgtgttcttattggctttggtgctttcaatccaattcgtagtgggacaagatgaggaggctatagatgaggaagtatcccgggaagccgacaatgtacttttgagttcaggggcaactaatctcgttgaaaactttaaaagctctgctggagataattcccaaagtgtggatgggccaacttctggcttagctgatgagattgcagcttctccagaatcggaagtagaagttgctactgaatctgccggtgagatgaagcgtaaaatggcataatagacccccatgatgtttagaaagaaacatcagacctaaagttttttaaagaggtggctaaagcggttaaaaataataaaaacaatgcaaaaaataataaaagcaacatccatagttnttgcaaaatatgtaatgcaacaatttacttttaaaa

SEQ ID NO: 4414 - DNA, 386 bp, Gossypium hirsutum
  Clone ID: LIB3493-034-P1-M1-B4
cccacgcgtccgcccacgcgtccgcccacgcgtccgcggacgcgtgggtgagaagattgctgatgggtatggcggactcgttctcgcaactcataatcttgagtcagggaaattggcagcatcgaaagcacgaaatttatgaattgagaaggggaatcaaaagcttgaatttgcacagttatatggaatgtcggaagcgctgtcgattggattgagaaacgcagggtttcaagttagcaaatacttaccctatggaccagttgatatggtaatgccatacctgtgaaggagagccgaagaaaatagaggactcttatcaacttcaagccttgatagaactcttatggggaaggaggtgaagagattatttaagtgtctgcattttg

SEQ ID NO: 4415 - DNA, 266 bp, Gossypium hirsutum
  unsure (1)..(266): unsure at all n locations; Clone ID: LIB3493-034-P1-M1-B5
gtaaagtcaatgtcatggtgtggtgagaacagatgtgtaggtattagaaaggaagacatgatattaaatgccacaaatggtgcgttgtcagaggtgttttcttcggngaagatagcaccacctttggtcgttgctcttccctctggggaacttattcttgggaaggaaaatattggtgtctttggggatcaaaatggaaagcttcttcaagctgataggatatgttggtcagaaactcctgctgttgttgtcattcaaaaaccata

SEQ ID NO: 4416 - DNA, 343 bp, Gossypium hirsutum
  unsure (1)..(343): unsure at all n locations; Clone ID: LIB3493-034-P1-M1-B6
atgtgtcgacagacttatggatttgcggagcgaactggactcattacaggaagcttcaggtgggaagcgtatatctgtcaatgatcttgtaattaaggctgctgcattggctctccgaaaggttcctcagtgcaatagttcatggacagatgactatattcnccagtataacaatgtgaatattaatgtagctgtgcagacagagaatggactttacgtccctgttatcagggatgctgataagaaaggtttgtccttaattgctgatgaggtcaagagtgtggcacaaaaagccaaagataactacttataaccagaagtattcgagggaggcacatttaca

SEQ ID NO: 4417 - DNA, 472 bp, Gossypium hirsutum
  Clone ID: LIB3493-034-P1-M1-B7
cgaaaatggccttacctgtgtccgtgcgcaaggagatggatgttcttgatatggcaaacaaaaatacgaaattcttggaggaggacaataagcaactcaatttcattgtgaatcaacagcaactgacttatgaaaatgtgagagagcatatggatcaccacggataccatcgagctgctcgtgctgacttcaactcgcaaatgcctttcgcattccgagtgcagccaatgcaaccaaacttacaagagaggatgtgatgaacattgtgagggttatccaatagctaaagctgcctatatgagctataaggtcaaaaatggagggggtgcttagtttctgaatgataataacttttaagttctacgagtattccagtgtttatgacaatcttagtaatatagatatcaactatgaatttgatattatgaacaattattgtatctactttgagcaacttatatgtgtctctatg

SEQ ID NO: 4418 - DNA, 351 bp, Gossypium hirsutum
  unsure (1)..(351): unsure at all n locations; Clone ID: LIB3493-034-P1-M1-B8
gggaaaaagaaaaagagagatcaagagtgttgattttcctattttaatgatgaggagaaagtgtanaacaattggagaaattgcagttatggaactagctgacgtcggagttcaaacgcgagccgtggcaacaaccggaagagttcagacctatctcaaaagattaaactaccgcgacaaagaacaggaatgtaaaaaaactacttcttctacgacctcaactacatcttatatccagttaagaagtcggacatttctgacggatcgccatggtggtgagggcaactctatcttgagccttaacttcgaccatgatgatggccggtgatgagaaaacacatttgaatccta

SEQ ID NO: 4419 - DNA, 481 bp, Gossypium hirsutum
  Clone ID: LIB3493-034-P1-M1-C1
atcatcatcgccatcctcggatcttattgaaggccgtgcggtatcattcgacatcagcatcggtaatgctgatagttacattaaagagttccggagcaggatgccatcgacccggtacgatgcggtatgtagcggcagtcaaccggagcatgactgttcagtttgcctgactaggttcgagccagaatcagagattaaccgcttgtcctgcggtcatctgtttcacaaggtatgcttggaaaagtggttgaactattggaatgtcacatgccctctttgcaggaacgctctgctgcccgaagacgatccggcctacttttggtgagcgtgcggagattttcgaattttccatgtacagcgcgtttattgtacaggtattttaaatgaaacgatgccgccctcggattagcgttaagcggagtggggttattacccgcgagatgtggtgatgtttttgttactgaatgtacatatacttttt

SEQ ID NO: 4420 - DNA, 462 bp, Gossypium hirsutum
  Clone ID: LIB3493-034-P1-M1-C10
aaaacaaacaagacgtcagctaagagtgaatggtgggcaatgctaatggggaggatgctattgaggcactccaatcacaagttcacatttggagacatgctttcaacttcgtaagcttcatgtctctaaaatgtgcacttgatttaggcatccttgatatcattcatgatcatggcaagcccatgactattacccagctggttgctgcgctacagattctcaaccctactaaagcatgcgacatttataggctcatgcgcattctagttcactcggacttctttgcacgccaaaagctagacaatgatgctcaagaagaaggatatgttcttaccaactcttctcgtattttgctcaagaataatcccttctgcataacgcctactttgaaggctacaatggatcctattataacaaagccttggagttttctagggacctggttccaaaatgatgatcata

SEQ ID NO: 4421 - DNA, 452 bp, Gossypium hirsutum
  Clone ID: LIB3493-034-P1-M1-C11
atcccctcagataacagctgcctttgcaatgctattgggtatgttatggaccatgacaagaccaaagcttcggaattgagacaggttatagcagcaacagtggccagcgatccgacgaaatattctgaggcatttctcggaaagccaaatgcagagtattgttcatggattctcgactcggaaaagtggggaggtgccattgagctttcaatattagcagattattatggacgtgaaatcgcagcatatgatattcagacatcccgttgtgatttgtatggtcaggaaaggaactattcagaaagagtcatgctgatctatgacggtctccactatgatgctttggctatgtctccgtttaaggatgctcccgaggagtttgatcagactatattttccgtacaaaaggatagaaccatcgggccggttgaaggcctagcactgaatctggt

SEQ ID NO: 4422 - DNA, 459 bp, Gossypium hirsutum
  Clone ID: LIB3493-034-P1-M1-C12
aaagaaatgcctttcattgctagcatgggcatatatgttgtgagtaaagatgtgatgttgaatcttcttcgagaccagtttccgggagccaatgattttggaagtgaaataattccaggtgctacttccattgggatgagggtgcaagcttacctgtatgatggctactgggaggacattggtacgattgaggcattttataacgcaaatctgggaatcaccaaaaagccagtgccagatttcagcttctatgaccgttcgtctccaatctacacacagcctcggtatttgccaccatccaaaatgcttgatgctgatgttacagatagtgttatcggtgagggttgcgttattaagaactgtaaaattcaccattctgtggttggtcttcgatcttgcatctccgagggtgcaatcatagaagataccttactgatgggagcagattattatgagact

SEQ ID NO: 4423 - DNA, 464 bp, Gossypium hirsutum
  Clone ID: LIB3493-034-P1-M1-C2
ggaacctcgctttgttgaatacttccgcctagcaacggcagaattggagtatggtcggatgaatattggaagccgtccatcaaaaaggaaaccaagtggaggcattgaatcactccgtgcaatcccatggatctttgcatggactcaaacaagatttcatttacctgtgtggcttggctttggggctgcatttaagcacgtcattcagaaggatataaagaatctccacatgctccaggagatgcacaaccaatggcctttctttagggtcacaatggacttaattgaaatggtatttgccaagggagaccctggaatcgctgccttatatgacaagctgctagtgtcaaaggaactctggccctttggagagaacttgagagctaactatgaagacactaaacgacttgttctccaggttgctggacacagagatcttcttgaaggtgacccttacctgaagc

SEQ ID NO: 4424 - DNA, 138 bp, Gossypium hirsutum
  unsure (1)..(138): unsure at all n locations; Clone ID: LIB3493-034-P1-M1-C3
gttcttataattttgaccttgaggatttattgagnggttcagctgaagttctgggaaagggtanttatggcacagcatacaaagctgttctggaggaatcaacaacggtggtagtgaaaaggttgaaggaagtggttg

SEQ ID NO: 4425 - DNA, 400 bp, Gossypium hirsutum
  unsure (1)..(400): unsure at all n locations; Clone ID: LIB3493-034-P1-M1-C4
cacgcccgtccgnngctatcttaagggtgtcgcccctttaanaaanngatacgcnngggggacactatgtgagagcccctgcgcatcnnnatgtatgccaaaggacctcnnttgggagaccaaagnnctcggttgagccatanttatgacccgcagngtgacccgagagagtcgaggtccaacggtgatctttttccatgaaccaagtttgactagggacccatcctcttcacttgcaacccatgagtcccacgactgttaagcaagtcagctgtgtgtgggatgcttatgaggcaaccaaagatgcccatggaatttgcattctgaccgagtgggacgaattcaagaaactcgacttcaagaggatatactacaacatgcaaaagcccgcttttgtttt

SEQ ID NO: 4426 - DNA, 469 bp, Gossypium hirsutum
  Clone ID: LIB3493-034-P1-M1-C6
gaagcaagtgattctcgtgtcgggacattcaggcgtggacttgaaaaaattatactggataagcatgaagacacaatgagcaagatgggagcaatcttggcctctgggatccttgatgctggtggaagaaatgtaaccataagattgctttccaagacaaagcatgacaaaatcactgcagtcgttggtcttgctgtttttagccagttttggtattggtatcccctcatttattttgtcagcttgtcattttcacctacagcctttattggactgaactacgacctgaaagttccaaggtttgagttcttatcacatgcaaaaccttcacttttcgagtatccaaaacctactactgttcccaccacgacatcagcagtcaaacttccaactgctgtcctgtcaacatcagcaaaggctaaagctagggctaagaaagaggcggaacaaaaggcaaatgctgagaaat

SEQ ID NO: 4427 - DNA, 450 bp, Gossypium hirsutum
  Clone ID: LIB3493-034-P1-M1-C7
cccacgcgtccgaagatgttcaactgtgggggggacgaaacagtgggatctgcactatctatacactgttgaaccatattgcttcaaatctaccttcatactcatctcaaaacctgggatcaaaataagtcccttagatctcttgataccaacaaaacctcagattttcttactacaacactttccatacagggacgagatgacaaaatagtgtggaaagcccaccacaatggggtctttacgcttaaaaatgcttattcctgtcttttccaggggagctgctccattactcccccctcaatctcagcaaatcgcctaagttaatctttggcaacttaaaattccttacaaaatcatcggtctcctgtggaagatttgtcataattacctacccactaaagacctcctctcgagatgcctttctactaatgataatctctgtcctctatg

SEQ ID NO: 4428 - DNA, 450 bp, Gossypium hirsutum
  unsure (1)..(450): unsure at all n locations; Clone ID: LIB3493-034-P1-M1-C8
agcaaactgggttgttgaaatggcatggaagggtgtgactcgtgcaaatcagcgacggcgactcttttctgccgggctgactcggcgtttctatgctccaactgtgactccaaaatccacgcggccaacaagctcgcctcgcgtcacgctcgagtttgggtctgcgaagtctgcgagcaagcgcccgctcacgtcacttgcaaggccgatgcagccgctctctgtattacctgcgaccgtgacatccactccgccaaccctcttgctcgccgacacgagcgcctccctgtaacccccttctacgactccgtcaattcagtcccagccgtcaaacccaacggagttgttaactttctggaggagcgttacttctccgacgtggacggagacgctgatgtcagccgggaggaagcggaggcggcgtcntggctgcttccgaaccctaaccat

SEQ ID NO: 4429 - DNA, 440 bp, Gossypium hirsutum
  Clone ID: LIB3493-034-P1-M1-C9
ccgtgctctaacctggacagttgtgtggactttaatggtaagcatagcgtcgttcgtaccagagatggccttcgtatctgcagtatccccatcatcatccttctcgcgctcctgcaacagtgaaggatttgttaggattcctttggacttccccagggagaaactgtgtttgcctgctcatacggtgaagaggtctaagatcgatttctttgtgcccaccatctttgctgctcttgttgttgctgcttctgcttgtgttgttcgatctctgggcttatgggggactgaaactggttaatttatgtctctgtatgtatgtatttgatgattgttttacagtcttctttctttttaaatcatgattcctgaagaaatatccaaattcatatagttaataaaagatcagtccatgttttctgttcgctggctgatgtttgctt

SEQ ID NO: 4430 - DNA, 485 bp, Gossypium hirsutum
  Clone ID: LIB3493-034-P1-M1-D1
cgacactgggagtttcgaagttgctggtggtggcagtggcagtgatggttttgcggctggtggtgaaaatgtgggacttgtgggtggtgatcaactcggtagtgccgaagatagctacaaagaggaaaccgcaggttttggcctaaacgatccaccgagtgacaacttccgggatgatgaggacaggaatggtgacttgtccaaaagggtatgaaataactcatttcaatttgatttggggataatagttggattgttttggttgaagttctcgaacactctctcttaactaattgttatgtcttagtgattcatgcgcctgagtccctgtaaaaccttttttctgatagagaaaactgaatattcaaaattgaagtgcctattggggtatttttgttgcgtctgttttatgatttcatcgtaactatgtttataaattaattagtaagtttgtgactggtttggttttatttttaaatctacaa

SEQ ID NO: 4431 - DNA, 408 bp, Gossypium hirsutum
  Clone ID: LIB3493-034-P1-M1-D10
cgttacagcatatcaaattgatctgagggagcgtagatgaacagctcgagatgcatcttaacagggtttggagctaacgaaaacaacactaagaaagatgacggctgtggcgatggtgattgtgatcattattatcaagatgtcaaagcagactggaaatccaatcgaagagaaccgcaagaagatttggcttgtagactcaaaggggttgattgtcgactctcgtaagcattcacttcaacacttcatgaaaccttgagctcatgagcatgaacctgtcagcaaactcgtagatgctgtcaaggcaatcaaaccaacggtcttgatcgggacatctggggtctgaaaacaatttacaagggaggttgttgaggctatggcatccatcaatgaaaaacctcttattat

SEQ ID NO: 4432 - DNA, 471 bp, Gossypium hirsutum
  unsure (1)..(471): unsure at all n locations; Clone ID: LIB3493-034-P1-M1-D11
caaaagctcaccgtcttgaacttaggtgatgataaaatcaacggcgaagtcccaagctccattgttcaactttccagtttaaaacacctcgatttgagcaacaacctcctcaccggcgaagtcccggccaactttggcaacctgaaaatgctgagccgtgcattactgagtggaaaccaactcactggtacgatcccaatctccatcagcaacatgtaccggttagccgacttggatttatcgagaaacaaaatacagggtcaaataccagcacagttaggcaaaatgaaggtgctcgcaacgttggacttaggcagcaacatgctcaccggcgaaataccgccggcggttctgggtagtaccggtttgggtatcttaaacttgagtcgaaactcccttgaaggcaacataccggacgttntcgggccgaaatcgtacttcatggcacttgatttatcgttcaataacttg

SEQ ID NO: 4433 - DNA, 458 bp, Gossypium hirsutum
  unsure (1)..(458): unsure at all n locations; Clone ID: LIB3493-034-P1-M1-D12
cggttgcttctcagnnctgagtttcggggagagacaaggaaggaagcatcagttttctgtgaatccaagaaaaaatattcccttttcgttttaatctttgttgtagctaatccatcatcgttcgcgtgagagaaaaatggctaagaatgtgggaattattgctatggatatttacttccctcctacctttgttcaacaggaagccttggaggctcatgatggcgtgagcaaaggaaaatacaccattggacttggacaagattgtttggccttctgtactgaggtcgaagatgttatctcaatgagtttgacagttgttacttcactccttgagaagtataagattgaccctaaacaaattggccgtcttgaagttggcagcgagactgtgatagacaagagcaagtccattaagactttcctaatgcaaatttttgagaaatgtggaaacactgaca

SEQ ID NO: 4434 - DNA, 473 bp, Gossypium hirsutum
  Clone ID: LIB3493-034-P1-M1-D2
cggacgcgtgggttcacgcgcatgccacgcgctcctgtttaatcttccttacactacgcgccgtctcggaaacctcgctcccaatctaatagtaaaagtctcagctccacggaagagtcgccgttgcctcaaccctttcgtttcgactgctagtctcatgggttcagtttctgcgttgaaagagcctttagagtatccaattcctcgcagagacgactctgtcgttgacgattaccatggcgttaagattgctgacccttatcgatggcttgaagatcccgatgctgaggaagtaaaggattttgttcagaaacaggtaaaattaaccgaatcggtgcttcagcagtgcgaagcaaaagataagcttcgcgagaaaatcaccaagctttttgatcacccacgttatgaggtcccattcaagcgaggcagtaagtatttctatttccataacactggacttcaagcacaaaatg

SEQ ID NO: 4435 - DNA, 432 bp, Gossypium hirsutum
  Clone ID: LIB3493-034-P1-M1-D3
cggacgcgtgggcggacgcgtgggattattggcccgccaacttcttcctcttgtctcttcgtggctggtttctttacattgcgttctcctgatttggcgactttgtaattcggataaagtttgcagtccttggttgaatcacaatggcagtgtctgcaattggatttgagggttatgaaaaaaggcttgaaatttccttttttgagcctggcatctttgctgatcctgaaggaaagggtcttcgggcacttaccagagcccagttggatgagattctaggtccagctgaatgcaccattgtttcttcattatctaacaagcaagtggactcctatgtcctttctgagtctagcctctttgtctatccatacaagattataatcaaaacctgtgggacaactaagttgcttcttgctatcccacccatcttga

SEQ ID NO: 4436 - DNA, 495 bp, Gossypium hirsutum
  Clone ID: LIB3493-034-P1-M1-D4
cttgacttgatcaatcacctaagctttccttgtacagtgactctttgcttaacttgactccattcccaattcacactatttactatttagaataaattactaaaataaaaatcccctttccaaacccaaaaaagctcgtagtaaacgaaacagcagcaaaaatggtgctcacaaccacgaacccggcgccgaagcagtttgttgaatccagtacctttgcttccagatatgtccgccaacctcttcccaggttccagatgccagaaaattcaatgcccaaggaagcagcctatcaagtaataactgatgaactgatgcttgatggaaatcccaggttgaacttagcatcatttgtgaccacatggatggaacccgagtgcgataaactcatgatggcttcgataaacaagaactacgtcgacatggacgaataccctgtcaccactgagcttcagaatcgatgtgtaaacatgatagccaacttatttaatgctt

SEQ ID NO: 4437 - DNA, 548 bp, Gossypium hirsutum
  unsure (1)..(548): unsure at all n locations; Clone ID: LIB3493-034-P1-M1-D5
cggacgcgtgggttcgttttctccnattcccgctctgatggtttatgggaactgcttnnaccnancattgtcttccaaacagagaaatggttacgcttctgtgctcttttatgctgcctggtgcccgctctcacacagtttgtatccaaagttcgacattctcagttccatgtttcctcaaattgaacatctggcagttgaagagtcttcagcttcaccaagcatattttcaagatatggaattcatagcttgccctcaattttaattgtgaaccagacgttaagggtacaatatcgtggtttaaaatatctctcctcaatcataacaatttatgagaaaacaacatgattttaaccatttcaatatattgttggaaactaattatttgtattaggagaccacaatatatacattatacaattttcaaataaaatcccctatattagatattaaaatcttatctactaatttttattttgtatctttatttatattcttatatttaatgctctgtttaattttttttttatttaaataaattattttt

SEQ ID NO: 4438 - DNA, 453 bp, Gossypium hirsutum
  unsure (1)..(453): unsure at all n locations; Clone ID: LIB3493-034-P1-M1-D6
ctcagatggtactaatgacaaaatccaagctggtattgaggcangtgtctgccctcgacttattgagctcttgcttcatccatccccaacggtcctcattcctgcccttcgcacagttggaaatattgttactggggatgatatgcagactcagtgcattattggccaccaagcccttccctgcctcttgaacctgttgacaaatacctacaagaagagtatcaagaaggaagcttgctggaccatctcaaacatcactgctggaaatgtagatcagatacaggctgtaattgaggctgggattattgcccctctagtccatctccttcaaaatgccgagtttgagatcaagaaagaagctgcttgggcaatttcaaatgctacatctggtggtacccatgaacaaataaagtttttggtgagccaaggttgcattaagccattatgtgatct

SEQ ID NO: 4439 - DNA, 460 bp, Gossypium hirsutum
  Clone ID: LIB3493-034-P1-M1-D7
gtcgaaaactctcaaaacccctatcgaaacggtgaatctgggaaaaccgactcagctcatttagatccctatcaaatctgcaaaaaacataccatgatttgatcccaaaaccccaccccaaacaaatgggttttggtttttcttcaaaacccttcttccttttcctctcatttcttgttttctttaccaatcttgaactttaccctcttgttgaatcagcccctgattacataactttggtctacaaaggttgtgctaagcagtctttcacagatctggctgggatatactcccaggccttgtctgccttgtttcagaccttgctttcacagtccatgaaggtaaagttttacaagacaacaacgggtactggccaaaccacaatcactggtctttttcaatgtaggggagatctcagtaacagtgattgttacagctgtgccagcaggcttccaacttt

SEQ ID NO: 4440 - DNA, 464 bp, Gossypium hirsutum
  Clone ID: LIB3493-034-P1-M1-D8
gagtttttgaccaccaattgccgggtgcgatgggagaaactcccctttgatcgtcatctttcattaaaaaatgtccagaaagttgtcactgaggccgatggctatcagccccatttgattgctccagaacaaggatacaggaggctcattgatggttccatcacctatttcaagggcccagcagaagcctctgtagatgctgtgcattttgttttgaaagaacttgtgaggaagtcaatagctgaaacagaggaactgaagcgattcccatcacttcaaaatgacatagctactgctgcaaatgaagctttggaaagatttcgtgaagaaagttgtaaaacagtggtgcggcttgtagagatggaatctagttacttgacggttgattttttccggaagcttcatgcagcaccagagaagaaaccagagaagaatgggaacccacctggcccaaataatgacca

SEQ ID NO: 4441 - DNA, 420 bp, Gossypium hirsutum
  Clone ID: LIB3493-034-P1-M1-D9
ttatgaatggcttagctttggtcgacatgttcatggattccaacgaatgggtggagctatttcccaccattgtgtcaattgccaaaacaatcgaagtgatttcacctgggatgttgggtacacatagtggttctttgcaattgatgtatgaagaactacaggtcttgtctccattagtaccaacacgagaattttatacacttcgatattgtcaacaaattgaacaagggttatgggctattgtcaatgtttcatatgatttgccacaatttgcttctgaatgtcgatctcatagactcccttctggttgtttgattcaagacatgcctaatggttactccaaggttacttggttagaacattttaatattgaataccaaacccctcttctgcgatagtatacgatacctttgttcataa

SEQ ID NO: 4442 - DNA, 423 bp, Gossypium hirsutum
  Clone ID: LIB3493-034-P1-M1-E1
gaggatttaggtgaacctttatgttagcatgtgtacgccatcttcccctctcttgatctccttttctcattattttccaattgctttatgttgttaacaaaaaagggtaaatattagtgtgttccaagaacgtgaaaacctaagatagcacgcaaaacatttttcccccctttcagtggggggggataatcattttttatgggggagtttgtttccattgcaaagtggggaagaattgacattcggaggctgtaacctctcccatggcagtgaggaccaatggatggtatcccttcggccttgcaggcgaggttttagttgaaactgaaccgattctatgtcctgtactaactcctaagtcctaactaatttggttgaaaactcttttaatcattacaagtgcactctgtaacctaaactaaa

SEQ ID NO: 4443 - DNA, 359 bp, Gossypium hirsutum
  unsure (1)..(359): unsure at all n locations; Clone ID: LIB3493-034-P1-M1-E10
gttttgctattcctgcangagcanagcnnagtagcgataaagaaagagggaaagaaacaaacaggagagggaaacaatgagccggagcttgggcataccagtgaagctactgcacgaggcatccggccacgtggtaacggtggagcttaagagcggagagctttacagaggaagcatggtcgaatgcgaggataactggaattgccagctcgagaacatcacctacaccgctaaagatggaaagatatcacagcttgagcatgttttcattcgaggcagtgaagtcaggtttatggtcatacccggcatgttgaataatgcttctatgtttaaactcctttatgctaaaattaaaggta

SEQ ID NO: 4444 - DNA, 482 bp, Gossypium hirsutum
  Clone ID: LIB3493-034-P1-M1-E11
ggaacggaaccttctctcagtggctgacaaaaatgtgattggggcaaggagggcgtcttggaggatcatctcttccattgagcagaaggaagagagcagaggaaatgaggatcatgttgcacaactaaaggagtataggggtaagattgaagctgagcttagcaagatctgtgatgggattttgagccttcttgaatctcacctcattcctttggcctcatctgctgagtcgaaggtgttctaccttaagatgaagggtgattatcacaggtatcttgctgagtttaagactggtgctgagaggaaggaagctgccgagagcactttgttggcttacaagtctgctcaggatattgctcttgctgagcttgctcctactcacccaattaggctggggcttgctcttaacttctctgttttctactatgaaatcctcaactcacctgatcgtgcctgcaatcttgcaaaacaggcttttgatg

SEQ ID NO: 4445 - DNA, 358 bp, Gossypium hirsutum
  Clone ID: LIB3493-034-P1-M1-E12
gataaagctacctgataaagatcagctggagttgtcactgctgattacttaacttcgaaaggaaacaagcatgacgagctggattttgaattcttagggaatagagaagggaagcctattagcttgcaaaccaatgtgtttgcaggtggtgtggggaatagggaacaaagggttattctctggtttgatcctagtgctgattttcacaactatcgaatcctttggaaccaacaccaaattgtattctatgtggatgacatcccaattagggtattcaaaaacaacacaaacattggcgttgggtacgcatcacaagcaatgaaaatagaagctagcttatgggatggagatagttggg

SEQ ID NO: 4446 - DNA, 232 bp, Gossypium hirsutum
  Clone ID: LIB3493-034-P1-M1-E2
gattaatacgttgcacctttatacattaaaggtggagaaatctacattagctatactaatgaaccttggactgattgaagagtccaaaatttctaggtctttaccttggagactccctgcaaatgtcttccgtgttaaggaagatgttcgcccaatattttggcctaaccgtccaaagagttacttatctaggactattggttgagatcattacccacaagggctatggggt

SEQ ID NO: 4447 - DNA, 381 bp, Gossypium hirsutum
  Clone ID: LIB3493-034-P1-M1-E3
ggcagcagttatatccatgggaactgaaattgatgagcttgatcttattaatatcaaagaactatgtgatcaggttctaaatcttgctgaatacagagcacaactgtatgattatttgaagagcaggatgaacactgttgcaccaaacttgactgctcttgtcggtgaacttgttggtgctcgccttattgctcacggtggcagtttgttgaatcttgcaaagcaacctggaagtactgttcagattcttggtgctgaaaaggctctcttcagagctcttaagacgaaacattctactccgaaatacgggcttatctaccatgcatccttggttggtcaggcagcacctaaacacaaagggaagattttcaagtcacttgc

SEQ ID NO: 4448 - DNA, 205 bp, Gossypium hirsutum
  unsure (1)..(205): unsure at all n locations; Clone ID: LIB3493-034-P1-M1-E4
gtctcaagcaactcaaaccaaaccaaccccttagcnctggtccatctctcgtgaaagaggatggctaccatctcagctaacagctgtcgtctagtgaccagcatcagctagagaaccttggcttcattacaagaggcttgaggctgtccaaactgtcaaattcctcttccgtttggaaccaattaaagcactggggcctttgtcc

SEQ ID NO: 4449 - DNA, 480 bp, Gossypium hirsutum
  unsure (1)..(480): unsure at all n locations; Clone ID: LIB3493-034-P1-M1-E5
gaaaaaaaatcatacgcaatgagcactgctggtcaggttattcgttgcaaagctgcggtggcatgggaggcggggaagccactatcgatagaagaagtggaagtggcaccaccccaaaagcatgaagtccgtattaagattctcttcactgctttatgtcacactgatgtatactactgggagtgtaagggttacactcctctgtttcctcgtatacttggtcatgaagcctcanggatcgtggagagtgtgggtgagggtgtgaatgatttgaaacctggagatcatgtgctccctatcttcaccggagaatgcaaagaatgtcgccactgtctgtcagaagaaagcaataacatgtgcgaactgcttaggatcaactgcgaccgaagtgttatgcttgctgatgggaaaaccagattttccatcaacggcaagcctatctaccactttggtggaacctcgacctttacccaatatact

SEQ ID NO: 4450 - DNA, 464 bp, Gossypium hirsutum
  Clone ID: LIB3493-034-P1-M1-E6
cggacgcgtgggccgaggtgaaccgtctcgaggtaagaatagaagctcttgaaaatgagcttcaagatgaaaagagaagtcatcaagatgcttttgcccgatgtaaggaactagaagagcaattgcaaaggaatgagacctgttctgtatgttcttcagcagccaagaatgacctcaagaacaagcaggagaaagaattagcagagaaactagcggaatgtcaagaaaccatattccttcttggcaagcaattaaaagctttccgtcctcaaacagatataacgggatcacccttcaacgagaggagccataagggtgacgatggacccactaccagtggcatcaacttgcaggatttatatcaagcaaagatggacagtatcgctgctgctgctgcttctggcattggaagcagaggtggtgcagagtctgccctggagtcaggtaacacaccaagcagccca

SEQ ID NO: 4451 - DNA, 498 bp, Gossypium hirsutum
  unsure (1)..(498): unsure at all n locations; Clone ID: LIB3493-034-P1-M1-E7
gcagtgcagcagattccatcttctgtgagaggtcgacaatgggaagcgtgagctgtcnaaagagactggccgaccacaatcgtcgcaggcgaaaatctcaacagcagcaacccaataccactcaagaaaaccagaagcacctcccacttgaaagtggtggcaatccctcctctgataatccccaaggtcaccgccggattctagggtccagtcatcttcttcagtaacggtggcagcttcgccgccgcgaatttcattggattgtttcaggcaaagacctcacaatgcagcggtctcttcatcatcatcaggcacactttttttctcaagtgggtaacagttaacaatggagtagctagccaaggaattagcaagctgaaaacgtcccgtctctgctatattcttatctctgaattttcaatattgtttaatattcagatggtgttagcttatactgacatcaagaaatttggactaatttatagaacaatttatatt

SEQ ID NO: 4452 - DNA, 374 bp, Gossypium hirsutum
  Clone ID: LIB3493-034-P1-M1-E8
agcaagttggttcttcctgtccctgcgttcaatgtcatcaatggtggtgtgacatgcaggaaacaaacttgctatgcaggagttcatgattcttcctgtaggagcatcatcctttaaggaggccatgaaaatgggtgttgaagtctatcaccatttgaagtctgtgattaagaagaagtatggtcaagatgcaaccaatgtcggtgatgaaggtggctttgctcctaatatccaggagaacaaggaaggacttgaattgttgaatactgccattgctaaagctggttacactggcaaagttgttattggaatggatgttgctgcatttgaattttacggaacagataaaacttacgaccttaacttcaaagaag

SEQ ID NO: 4453 - DNA, 288 bp, Gossypium hirsutum
  Clone ID: LIB3493-034-P1-M1-E9
gactacttgtggtgaacaaaagacaccttcgagcgcattgtgaccatgcttacagatggcagtaccgattatacaaatggatctgtagacagtggtgatagcactttaagctgcaacaagtagagatgaagaactatgcccagaatgttacctttgatgattataccaatacctatgacaaaccgactacgattgctgcacaacgctggaagattcacactggcgtggtggtgcattctcatggtagcatttacagatggacgggtgacatgctaggaatgatggtcg

SEQ ID NO: 4454 - DNA, 458 bp, Gossypium hirsutum
  Clone ID: LIB3493-034-P1-M1-F1
atcaaccaagatagttgccttacagtcgttcctctcggtcatggcgacccctctcattttccaagcttcaggactactcctgctgctgaagatgccatcgttgatgctctacgttcggctaagcacaattgttatgcgaccactgttggtattcttcccgcaagaagggcacttgcagattacctcaaccgtgaccttccctacaagtcatcgcccgatgatgtttatttaacaaatggatgtactcaaggaatagaagttgttatatcaattctttcccgccccggtgccaatattttgcttcctagaccgggcttcccactctatgaagcttggtgtgcttataaccatcttgaaatgcgtcattatgatcttcttcctgaaaaaggttgggaggttgatcttgatgctgtagagactcttgcagatgagaacactgttgctatggttattataaa

SEQ ID NO: 4455 - DNA, 495 bp, Gossypium hirsutum
  Clone ID: LIB3493-034-P1-M1-F10
gtggtggtgaagataacgatggttgggatgtggagaattcagagagtcccattaaagaacagagtccaattcattgtttggataatttgggtatccacagaaggagaccagtgcatgaagatggggttcgaatatggctaaataatttgggtttaggaaggtacgctccactgttcgagatccatgaagttgatgatgaggttttgccattgttaacattggaagatttgaaagatatgggaataaatgcagttggttctagaaggaaaatgttttgtgctattcagaagcttagtaaagggttttcataacgtttttgcagtgatggagatatttatccgccattgcaatgtaagtttaagcttgtattagctctttctctgtttacattaacatttggtggagtgaagtaggagaatcattagggttttttttgtaaaagtatcattgacgagtctgattgtattttgacgttttcactcatagcaaattaat

SEQ ID NO: 4456 - DNA, 451 bp, Gossypium hirsutum
  Clone ID: LIB3493-034-P1-M1-F11
gggtgctttcacaagctgcttgtggagtaggcaccagtcagccaaagaaacatcgattattggttattgtttcggttacagttgctgcaatggttttcctgaagatagctatcatctgttacctgcaaaagaaaatattcaaatcacaagggctttggtgtgcattgaaaatgttggtttcttggataagaaccaaaatatcagctgaaaaaaggcatgaaaacgatgatcctaatctccaagttttcagtttctatagcattaaagctgccactaataacttttcaaagtaagctcggagaaggtggatatggacctgtttacaagggaaagttaccaaacgggcaggaaatagcggtgaagaggctctcgaaaagctcgaatcaagggtttgaggagttcaagaatgaggtcactcttacagctaggcttcaacatgtgaatctagttc

SEQ ID NO: 4457 - DNA, 434 bp, Gossypium hirsutum
  unsure (1)..(434): unsure at all n locations; Clone ID: LIB3493-034-P1-M1-F12
cgtggaccttagcatgtacaaaggagagggggtccttgtggttaatgttgcttctaaatgtgggtttacggattcaaattacacccagttgactgagctttacaacaaatacaaggacaaagggttggagatcttggcatttccttgcaatcagtttttgaagcaagaaccaggtaccagccaagaggcagaagagtttgcttgcacaagatacaaggctgaatatcctattttcaaaaaggttcgttgcaacgggccgaatacagaacccgtcttcaagttcttaaaagcaaagaaatctggtttcttgggatctaggataaagtggaacttcactaagtntttagttgataaggatggtaacgttctctctcgctatagcccaaccaccacaccactgggcataaagggtgacatcaagaaagcattgggag

SEQ ID NO: 4458 - DNA, 481 bp, Gossypium hirsutum
  Clone ID: LIB3493-034-P1-M1-F2
cttgccatctgtttcctctactggtgggtgaataagtgtgttcctcttcccacacgtagcaagaagaagaaggaaaaacctaaaatgggaacaatggagagcttgaaattcttgctgtcttcaaagtacattagggatcttgccactttggtggttgcatatggtatcagcatcaaccttgttgaagttacctggaaatcaaagcttaaagctcagtttccaagcccgaatgaatactcctctttcatgggtgatttctcaactgccactggaattgcgacattcactatgatgctactaagtcaatttatatttgacaaatatggatggggagtagctgctggaattacacccactgtcctacttctgtctggagttggtttcttttccttgatattatttggtggtcctcttggaccaactcttgcaaagtttggcatgactcctcttcttgcagctgtatatgtgggtgccctgcaaa

SEQ ID NO: 4459 - DNA, 399 bp, Gossypium hirsutum
  unsure (1)..(399): unsure at all n locations; Clone ID: LIB3493-034-P1-M1-F3
gtatttttcagccaaaattgctgattttggacgagcagggttgaaatcagaggaaattaaactggaaattgctgaggatcatggatctatagcggaaacagagagtgtagctacaggatttgaggattatggatctattgcggagaattcggaaggtggtacagttgccgtttctccgccggcagttgcaacatctcctgaaattatggagaaaggaagcgtgtcggtctcggaggggaatttcgatagagcaagtgttgagaatggaaaagaattggtcaatggtggcgggaagcagagtggcggctccagcagcgattggtggtggaagcaagatatgggcgcaatgggagagagtgggaaagtgaangattatgtgatggaatggataggaagtga

SEQ ID NO: 4460 - DNA, 458 bp, Gossypium hirsutum
  Clone ID: LIB3493-034-P1-M1-F4
ccgccttcgacggttgctttaactttcattggtccgcgaaaaaaataaaaaaacgaactccaaatatctatggcgatgatgacttgttcaaggatttttctctgttattcaactccaagatcccaattccctacagtcatttcttctccttctcacttccttactccaaagaaagctacctataaatccaccaaacatattactttgaacgccaacggtggtaactctcgtttcatggcccgagtctcttcttcctctgccgctgaattccccaccaacatcggcgatatgctcagcgaagttaccattttcaccgcttcgggtcaacccgttctgttcaaagacctctgggaccaaaccgagggagtagcggttgttgcatttttgaggcatttcggatgctattgctgttgggaacttgcttcagctttgaaagaagcaaagccaaaattcgactc

SEQ ID NO: 4461 - DNA, 442 bp, Gossypium hirsutum
  Clone ID: LIB3493-034-P1-M1-F5
tccaaactatgtacctggggagaagaaagaggtgtgtgtaaagagtgtacagagaactgtgatttggatgggaaagaagcaggagacagttgaggacgttccttgtggtaatacagttgccatggttggtttggatcagttcatcaccaagaatgctacattgaccaatgagaaggaagttgatgcccacccaattcgtgccatgaagttttctgtctcccctgttgtccgtgttgctgttcagtgcaaggttgcatcagatcttcccaaacttgttgaagggttgaagcgtttggccaagtctgatcctatggttgtctgtaccattgaagagtctggtgaacacattgttgctggtgctggagagctccaccttgagatctgtctcaaggatttacaagaagatttcatgggtggtgctgagatcgtcaagtcagacccg

SEQ ID NO: 4462 - DNA, 427 bp, Gossypium hirsutum
  Clone ID: LIB3493-034-P1-M1-F6
ggtttaaagaactggtagcaagcaaggctcgtgaaggagttgaggctgaagttacggatatggattgggaaagtacattttacttgcgccatctccctgaatcaaacatggctgaaatcccagatctcagtgatgaatataggaaagtgatgaaggaatttgcagtgaaattggagaaactagcagaggagttgttggatttgttttgtgagaatattggattagagaaggggtatttgaaaaaggcgttttatggggcaaaaggtccaacctttggcaccaaagttagcaactatccaccatgtccgaccccagacaaaatcaaggggctcagagcccatactgatgcaggtggcatcatcttgctgttccaagaccccgtcgtcggcggccttcagcttcttaaagacggcgagtgggtcgatgt

SEQ ID NO: 4463 - DNA, 459 bp, Gossypium hirsutum
  Clone ID: LIB3493-034-P1-M1-F7
atcttattgctgggcttgccaacatgagggcgaggaactatagtattcctgaggtggataagcttaaagccaagttcattgcagggagaatcataccagcaattgccacatccaccgctatggcgactggtctcgtctgcctcgagctatacaaggttctggacggagcacataaagtggaagactatcgaaacacattcgcaaacttagcattgcctttattctctatggccgagccagttccacccaaggtcatgaaacaccgtgacatgagctggacagtatgggaccgatggatcttgaaagataatccgacactgagggaactcattcaatggcttaaagataagggtttgaatgcttacagtatatcatatggaagttgcctgctcttcaacagcatgttcccgagacacaaagagagattggacaagaaagtagttgacgtggctcgggaaa

SEQ ID NO: 4464 - DNA, 441 bp, Gossypium hirsutum
  Clone ID: LIB3493-034-P1-M1-F8
ttctaagccaaacgaaatctaatccgttttggaaaatggcaccaaaagctgaaaaaaagccagccgagaagaagcctgcggaggagaagaaagccgtagctgagaaagccccggcagagaagaagcctaaggctgggaaaaagcttcccaaggaaggcggagcggctgccggagacaagaagaagaagagagttaagaagagcgtcgagacctacaagatctacatcttcaaggtcctgaagcaagttcaccctgacatcgggatctctagcaaagctatggggatcatgaacagtttcatcaatgatatcttcgagaagcttgctcaagaagcctctaggctcgcgaggtacaacaagaaacccaccatcacttccagggaaattcagaccgctgttaggcttgtacttcctggtgagcttgccaagcacgccgtttctg

SEQ ID NO: 4465 - DNA, 446 bp, Gossypium hirsutum
  Clone ID: LIB3493-034-P1-M1-F9
ggcaactattgagactgaaattgagactttggtcaattctgccatggatgatgaatcaagtactgaaatcaaggatcatatgccaagtccaatgccattatcaagtgtgactaataatttgggtgttaatgaaacattatgggaagagttagtacatgaagacttaatagctggtgagccaaaagaggaaattgtggttggtgatcaagctgaagttgatgttgaagttgaggatttagcagcaaatcctattgattggggtgatgatttgcaagaacttgtggatcagatgggttatctcaggtcaaatccatgaccaaaaaaaactaaacacattaaatggaatgtaatggatgatgttgttgttctagcccttttgagttggtcttcttgacaccattccttgttttctaaaaccggcgaagtaagtgaacaaaggtttatga

SEQ ID NO: 4466 - DNA, 476 bp, Gossypium hirsutum
  Clone ID: LIB3493-034-P1-M1-G1
cggacgcgtgggggaaaacaaaatttcaagcttgaagttttgattcaaacactgtaccttttcattctctcataaaactcaaatcccaagttcttatcaatgggtttctcagtcgagaattcggtaacacaatcccacacgagaacccacaaaatcttcttaatcagcaattaccttctattgggagccgcctccagttgcgtcttcctcaccctttccctccgcttattcccttccctgtgcggattcttccttattctcctccatgtcatcaccatcgccgccgccgtcttgggttgctccgtcgccatttcgggttccaacaaacgctacttggcttacatggtgtcgatggtgctgacatcaatattcgaaggctctgtttcggtgcttatcatgacccgaacgtcggatttcttggggtacttgaggtcttacgtgagggaagatgatggggttttgatattgaaactggc

SEQ ID NO: 4467 - DNA, 266 bp, Gossypium hirsutum
  unsure (1)..(266): unsure at all n locations; Clone ID: LIB3493-034-P1-M1-G10
gtcaccctatcttttccagctgtantggcagggcgaagtcgcgggatatgcagtttaatactcctaccgtaaagatgaacaaggaaaggctcatgaaaatggctggtgcagtccgcactggtgggaagggtagcatgagaagaaagaagaaggctgtccacaagacaaccaccaccgacgacaaacgattgcagagcacccttaagagaataggagtgaatgctattcctgcaattgaggaagtcaacatattcaaggatgatgtt

SEQ ID NO: 4468 - DNA, 268 bp, Gossypium hirsutum
  unsure (1)..(268): unsure at all n locations; Clone ID: LIB3493-034-P1-M1-G11
tggcactctgcatctctaatttgttggtttgtctttttgggtgatggtgcgctttctntttctcncatctttatatttttctccgattcatacacagtcgaaatcttttatctttgtgatttgcaaagaaatgaaaatgaatgaaagtatgggaaaccctcttcacctcaaatctttgaaccacatctcccttgtgtgtagatcagntgaggaatccatgaacttttatcangatattcttgggtttgctccaatcaataaaacctgt

SEQ ID NO: 4469 - DNA, 438 bp, Gossypium hirsutum
  Clone ID: LIB3493-034-P1-M1-G12
atttcaaccattggggatatccgagtggaacggccttttttggattgctcatcctggtggtccagcaatattagatcaggtagaagccaagttagcactgaagccagagaagctacgagccacaaggcacgttctttcagagtatggtaacatgtcaagtgcttgtgttctatttattttggatgagatgaggaagaaatcaagggaagatgggcttcagaccacaggagaagggttggagtggggagtgctctttgggtttggacctggcctcactgttgagactgttgtgctccatagtgttgctgcttaaagttaaacaaacatgctttttaagtaattggtcgtgctccacttggcttgcagttttatcttcttttttttttcctttttagattatttaaaatccatgaatttgtgtggttattggttaagact

SEQ ID NO: 4470 - DNA, 297 bp, Gossypium hirsutum
  Clone ID: LIB3493-034-P1-M1-G2
aaaaaaaggaaaatcaagaaaatagaacacttgatcagatcagaaactgttcttagtttcccttttttttttttttttgcaagagctgctttgaattcttaagtggacgccggagattgtaagagaaagatgcgcttgatctgttccaagtttcatttccaactcttcccagaagattggtgcttggacggaatgggcagctgcactgcagagtatatggtggatagcaaatactagagaatctattaaggtttcctggctgaattatggcttctgcaagcctaggaaatggtggat

SEQ ID NO: 4471 - DNA, 532 bp, Gossypium hirsutum
  unsure (1)..(532): unsure at all n locations; Clone ID: LIB3493-034-P1-M1-G3
gcttctcaccacagcctacttccgattcaaccgagtggcttaaagggttcttccgaaagctcgattccgtcaaacccataaccccaaaactccaaagttcaaggcttttgaaggtcagagcagatgttggtttcgatcctcanaccctcacgtcagatcccagctcttcatcaggtaaatcctacgatgacaaaatccaggaaattcttcgaaaccgtgattatgataaaaagtttggctttacgatggatatcgattcttttgcgatacccaaaaggctttctacagaaacaattcgtttaatttcttctttaaaggaagaacctgattggattgtggagcttaagttgtattcttattattatattatttgaaattgattaatcctctcattgtttttctttattctttactcactctatatgaattaccatactctgttcttttcacatttcatatctctaatattatttcacttcttttatttattcttattatttctcttatactctttttttttacttttctcttt

SEQ ID NO: 4472 - DNA, 484 bp, Gossypium hirsutum
  unsure (1)..(484): unsure at all n locations; Clone ID: LIB3493-034-P1-M1-G5
gcttcacgtaaaagaagaaaaccctccctcgggtaagaccctcttccgacttggactaaaccatnncnncccaacccaagcgaggcggtgttcacctgcccgctaggcgatctgcctccaactccgaccccagcatcctcaccaagatcacttcctccgccatcgtttctcgtggtaagcaggccgcctgcgacgccgctttcgtctccaagaagctcctccgtagcaccggcaaagccgcctggatcgccgggacaaccttcttgatcttatttgtccctttgatcatcgaaatggaccgcgagcagcagttcaatgagctcgagatccagcaagctagtctcctcggtgccccgcccactggaccaccccataagtaatcgggtcggaggttagagcttagttgtttatccctgtttcaagccattgtccctcttggttattctagtaaaaccattcagttgtaggtttatattttttcttt

SEQ ID NO: 4473 - DNA, 466 bp, Gossypium hirsutum
  Clone ID: LIB3493-034-P1-M1-G7
caattttcccccatcttaaaactaaagaaaggaacaatgtccgctggtgctccttctttttccttgagtgtgctctgttttgcttcattgctctcctttttggctgtggtgaatgcaagaatccctggagtttatactggtggagcttgggaaagtgcccatgctacattttatggtggaagcgatgcttctggaacaatgggcggtgcatgtgggtacgggaatctctacagtcaaggctatggcgtgaatacagcagctttaagcactgcactttttaacaatggccttagctgcggtgcttgctttgagattaagtgcgcaaacgaccccagatggtgtcactccggcagcccttccattattatcactgccactaacttttgccctcctaactatgctctcccaaatgacaatggcggctggtgcaacccttcacgccctcactttgacctttccatgccta

SEQ ID NO: 4474 - DNA, 438 bp, Gossypium hirsutum
  Clone ID: LIB3493-034-P1-M1-G8
ctgaaatggtagagctgcttattgactgtgtgagaaacccagctttcttggattgggaggtgaatgaacagcttcaaaaaatgaaagaggaaattgctgaagctgcaaagaatcctcagggcttgctcttagaggccattcactcagctggttattctggtgcattggcgaattctcttttagcccctgagtctgctgtaaatacattgaatggtacagttttggaggattttatcctggaaaactttaccgcttctcggatggtacttgcagcatctggtgttgaaaacgaggaactgttatctgttgccgagccacttttatcagatctttccaatgttcctcgtcctcaggagccaaaatctgtgtacaccggcggtgattatcgctgtcaggctgatttaggggatcaaacacattttgctcttgcatttgaac

SEQ ID NO: 4475 - DNA, 123 bp, Gossypium hirsutum
  unsure (1)..(123): unsure at all n locations; Clone ID: LIB3493-034-P1-M1-G9
agaaaaccctagctttacctttttgtgctttgttaaacatcaaatcggggagatggatctttcatanatttcacctcanatctctttctctttgtaccagaaaataaagttcacctctttatt

SEQ ID NO: 4476 - DNA, 444 bp, Gossypium hirsutum
  Clone ID: LIB3493-034-P1-M1-H1
ctgagcaagagatggatcgtagagataaagaaaggatggccaagctccgcactttgggtaatattcgtttaattggcgagcttctgaagcagaaaatggtgcctgagaagatagtccatcacattgtacaggaacttttgggccatgacagtagagcttgccctgcagaggagaatgttgaggccatttgtcagttcttcaacactattgtaagcaacttgatgagagcccaaaatcgcggcgaataaatgatacatacttcagcagattgaaggaattgactacaaatcctcagcttgctccaaggttgagatttatggttcgtgatgttctcgatcttcgtgcaaacaaatgggttcccagatgggaggaggtgaaagccaaaacaattacggaaattcattctgaggctgaaaagaatcttgggctgcgtccaggtgctac

SEQ ID NO: 4477 - DNA, 380 bp, Gossypium hirsutum
  Clone ID: LIB3493-034-P1-M1-H10
ccaaaaggagctgatccaaatcatccacaaggtgaatgtaaccgtcgtagtagaagcagcagtaaccttagtgattcttggaaggaggtatctgaagagggacgactggcttttcaagccctcttctccagagaggtacttccacaaagcttctctcctccacatgatggaaagaacaaggggcagcaaaaggaaaatgtaggtgcagacaagcaaaatccagtcgagaaagacagagagacatcaacattagaccttaatagaaagatgttagattctcgttccgacagtcaagaagtagagaaaaatgcattatcaaaagatgagaagaacaatgcagaaaacggcctgctgaggattggactaagacatgcgaaact

SEQ ID NO: 4478 - DNA, 383 bp, Gossypium hirsutum
  Clone ID: LIB3493-034-P1-M1-H11
ctattttgttaccctatcttttccagctgtgggggcagtccaagtcgcggcatatccagttcaatactcctaccgtaaagatgaacaaggaaaggctcatgaaaatggctggtgcagtccgcactggtgggaagggtagcatgagaagaaagaagaaggctgtccacaagacaaccaccaccgacgacaaacgattgcagagcacccttaagagaataggagtgaatgctattcctgcaattgaggaagtcaacatattcaaggatgatgttgttatccagtttattaatcccaaaattcaagcttctattgctgcaaacacctgggttgttagtggctctcctcagacaaagaaattgcaggatattcttcctggaatcatc

SEQ ID NO: 4479 - DNA, 498 bp, Gossypium hirsutum
  unsure (1)..(498): unsure at all n locations; Clone ID: LIB3493-034-P1-M1-H12
gaaaaactagagataaaatcaatcatggctcgagggaagatccagatcaagctgatagagaactcgaccaacaggcaagtcacgtattcgaagagaagaaacggtcttttcaagaaagctaatgaacttacagttctttgcgatgctagagtttcgatcatcatgttttccactactggtaaactccatgagtttatcagcccttccaccacaacgaagcaagtaattgatcagtaccagaaaaccttggggatcgatatctggaacacccactatgagaaaatgcaagagcagttgaagcagctgaaagaggttaacaggaacctgcgcaaagagattaggagaaggatgggcgactgtttgaatgatttgagcatcgaagatcttggtgctttggaacaagaaatggagagctctgtcactcttattcgtgatagaaagtatcgtgttctctccaaccagatcgatacttncaggaaaaaagtgagggaatgtgga

SEQ ID NO: 4480 - DNA, 416 bp, Gossypium hirsutum
  Clone ID: LIB3493-034-P1-M1-H2
aaaaaaagagaggaaatattagattatagatgtgagggtcgttacccccgccccccaaaataaaaaaccttgacccctgttaccaagggaatgtccactcttattgaagaggagattgaggtgagaaaagggccatggaccacggaagaggatacgctcctaacccattacattggtcgtcatggggtaggtccttggaatatgttggcaaaatgtgcaggtcttaagagaagtggtaaaagttgcagattaaggtggcttaactatttgaaccctgacattaagcgcggaaacctcactctccaagaacaacaattgattcttcaacttcattccctgtggggaaatcgatggtcaaaaattgcagagcatcttccgggaagaacagacaacgagatcaagaactattggagaac

SEQ ID NO: 4481 - DNA, 423 bp, Gossypium hirsutum
  unsure (1)..(423): unsure at all n locations; Clone ID: LIB3493-034-P1-M1-H3
ctttctttcttaaaactcaaaattagggtttgcgtttagcaaaatccctcagcatgctctgctagatttccctccttttcttcaaattttcctgctcgttgctttgcaagcttggtttactagattacataaaatgccaaggacaagggaagagattgaagagcaggtggaccttgatggagacaatgatcctgaggagactatagaggaagagattgaatatgaagaaatagaggaagaggaggaagtggaagttgaggaagaggtagaagaggaagtggaagtagaagaagaagaggaccaggatgctgagcttgttgatttccacanaggctctgatgctaatgaggggatggatgattttgaaacaaangaagaagagaaaaagaagcatgcngagctttttgcacttcctcctcatgg

SEQ ID NO: 4482 - DNA, 419 bp, Gossypium hirsutum
  Clone ID: LIB3493-034-P1-M1-H4
agtctttgtatacaccataacagcatggtgggtaatgggagagattcccaatctgtgtgatacttccttgttaccacatgacagtccatggacttgtccaatggaccgcgtgttttttgacgcatccgttatatggggacttgtcggacctcgtagaatatttggaacagaaggtgagtacgggaatgtcaattggttctttctcggtggagctctagctcctttcctagtatggctggcacacaaagcattcccagataaagaatggattcgcctcatgcacatgccggttctcttaagcgcaacatctatgatgcctccggctagtgcagtaaacttcacgagttggcttctagttggcttactttccggatttggtgttttcaatacagaccaaaatggtggaaacgttacaatta

SEQ ID NO: 4483 - DNA, 106 bp, Gossypium hirsutum
  unsure (1)..(106): unsure at all n locations; Clone ID: LIB3493-034-P1-M1-H6
ctattttgttaccctatcttttccagctgtggttgcantccaagtcgcggcatatccatttcaatactcctaccgtaaagattaacaaggacaggctcatgaaaat

SEQ ID NO: 4484 - DNA, 356 bp, Gossypium hirsutum
  Clone ID: LIB3493-034-P1-M1-H7
ctccagagaagaaatccgagcctgaggcatcgtttgagattttgaccaggcgcagcaagagtggttcctgctcaggagaagttcatcaagtttttagaagacagtcgatatgtgcctgtgaagttggcaccatccggattcgttcttctcagagacctgtgccctaatgaaccggaggtgctctctctaacagatgcacccacatccacggcatccccggcaggtggatcaacagcagctgcaggacaacagagttcatcagccatggcccgtgatgatgggcggagtcctcttaccattctagtctcatcctgatttacccaatcctggaactgaaacagggtcaagaatacttt

SEQ ID NO: 4485 - DNA, 411 bp, Gossypium hirsutum
  unsure (1)..(411): unsure at all n locations; Clone ID: LIB3493-034-P1-M1-H8
atcagagccttgataaatggcttcagtggaatgaaaggtcatttccccgtggtgttttggattggccgacgaggttgaaaattgctattggagccgcacagggattgtgttacatgcaccatgaatgtcctacgccgatcatccaccgtgacgtgaagtcgagcaatattctgttggacaaggagttcaaggccaaaattgcagactttggacttgcaaaaatgctaataaggnatgnattttacacaatgtcaacggttgcagggtnttttggntaccgnggggnaaagtatgcntacacaacnaaagtcaatacaaaggttgatgtttacagntttggagtggtactacttgaattggttattgggaagagaagtttatggnangtatgatagtttgtttttaatgtaa

SEQ ID NO: 4486 - DNA, 418 bp, Gossypium hirsutum
  unsure (1)..(418): unsure at all n locations; Clone ID: LIB3493-034-P1-M1-H9
gtattgatctagagtatggcatagttgatgctgtgaagttgcccgaaaagtgctaagaagtgacgagaagtcatagatgacagaaaccttccagcagctcttcagagaagattcagaaggggattaggcaacccataccccaaatccataaatgaaaacaagacctacccaccgaggtcttgccaaaggaggtgtcaaccggcccatncngtctgctggacccatcctgaggaggagggctccttattaattcagatgatgcagataatgaaccaaaatactccgtgacatggaatcctctaggtgaccatggtcaagacctgagccaacacagagaaagtctatgtgatttgatctgaaccaagaagtctgtctgatatacggaacatgcattgacttccatattcactcccatttt

SEQ ID NO: 4487 - DNA, 475 bp, Gossypium hirsutum
  Clone ID: LIB3493-035-P1-M1-A1
tgataattgcgtcatcctcggagctgcttctgttactaagaacgtaaatttgcaagtagcggagtgtgggaatgatgggttttgccccaataataacatcgccaacggtttaaatgtcggtaacggcgatgacaatgggagtattcccgagtcgttttataccaacggagggttgaaattaagggttgtttggacgattagctcgttgatcgcagcatcagcgaggcattatttacttcaaccgataatcgcagagcataagacgctagatagcttggttctaaccgattcggatggtcaaggggtgctttgtatgaatagagatcagcttgaggagttaagagtgaagccattatctgcttcttctgcatcgaaaaggacattggtgccggcactgaatatgaggctttggtatgcccctcagttggaattgcctgatggggttgttttaaaaggtgctactttggttgctatt

SEQ ID NO: 4488 - DNA, 237 bp, Gossypium hirsutum
  unsure (1)..(237): unsure at all n locations; Clone ID: LIB3493-035-P1-M1-A10
cagacgcgtgggcngacccgtgggcaaaaggaagaagggaggaagacagagcgtagaaatcgtgatgagttccgcaagttggtggaaggacatgttgctgcagcaacacttactgccaaaacccattggcgtgattattgcatgatggttaaagattcgcctccctttctagcagttgcatccaacacctcaggtccaactccaaaagatttgtttgnnnatgtatccgaggagctt

SEQ ID NO: 4489 - DNA, 476 bp, Gossypium hirsutum
  Clone ID: LIB3493-035-P1-M1-A11
ccaaaatcaaacgatttcgatctctgatctgggatttgttaccatgagcgacggagaagacgctgtacggcgccataatgcgattgcggagtaccgaaagaaactccttcaacacaaggagtacgagtccagggttcgggcaggtagggagaatctgagagctgctaagaaggagtttaacaaaacagaagacgatttgaagtctcttcagagtgttggacagatcattggagaagttctcaggcctcttgacaatgaacgcctgattgttaaagcaagcagtggccctcgctatgtggttggttgccgcagcaaagttgacaaggagaaactgacttctggaactagagtggtccttgacatgacaacacttacaatcatgcgggctcttccacgtgaagttgatccagttgtttacaacatgctacatgaagatcccggtaatgttagctattccgctgttggtgggttatctg

SEQ ID NO: 4490 - DNA, 472 bp, Gossypium hirsutum
  Clone ID: LIB3493-035-P1-M1-A12
atcgcccgctcatgtgttccttggtcgacggcgtgtcggcatccgacatggagaaatttctatgcgaccggttgcttgacccgacacaacccatatccgagcgcttccgagctctcttctcccttcgcaacctcaaaggccctgcccctcgcaacgctctcattcaagcgacaagggattcatcaaatttgttggctcatgaagctgcatttgcattgggtcaaatgcaagatgctgaagctattcctgctttggaagtagttctaaatgatctttctttgcatcccatcgttcgtcatgaggcagctgaagcacttggtgccattggtttggagagtaacattcctcttttgaagaatagtttggttctagatcctgctccagaagtccgtgaaacatgtgaactggctctccagcgaattgaggagttaaaatccgatggtagtgatgacaaatcatccatgacagaaaa

SEQ ID NO: 4491 - DNA, 475 bp, Gossypium hirsutum
  Clone ID: LIB3493-035-P1-M1-A2
gcaagttctgcttcagataatcatctatgccctatttgcatttgcaatgcaaaggatatggcctttggttgtggacatcagacctgttgtgagtgcggacaggaccttcagttgtgtcccatctgccgaggcaccatcgatacgagaataagactctattaagcataatatgctttgcctggacttgcttatgctctctctatcgtccagcattccaagagtaagtcctttaagtttattgtgcaaaaggcttcatagttggccatgattggatgcgcattggatcttttctttagagagattgggcacccatcatatatgtatccaaagttttgtacatagttgtggatttcatcgaactaaaaaacttagtcatatagcattatctatttcagtagatcatattgttgtaatgtaatcaggcacagaacacctgggaacagacatgtctcattgtcggattagcatccgtgcc

SEQ ID NO: 4492 - DNA, 472 bp, Gossypium hirsutum
  Clone ID: LIB3493-035-P1-M1-A3
tggcgactctctgattcaatgacgaccgtgacgaataacgtgatgctaaactgtataacgtcaccctctctcctgttggaggtgctgaacgggttatagcagtgaatggagctactcctggacctgctgttaatgtcacacctcatcacaatgagaatattaaggctcacaatcagttggacgaaaatcttttgatgacttgaccaggaatgcaaatgcagagaaattcatggcaggatggagctctcggcaccaactgtgcaattgatcccaagaagaattttacttaccgatttcaagtcaaggatcaaattgggagcttttgctacttcccctccctcaatattcaaagagcatcgggtggctttggtcccattattattaataaccggaatattatagcaattccttttgctcatccggatgctgacattgtcctcttggtgggtgattggtataccaaaaaccacac

SEQ ID NO: 4493 - DNA, 448 bp, Gossypium hirsutum
  unsure (1)..(448): unsure at all n locations; Clone ID: LIB3493-035-P1-M1-A4
ttttaaagttcttttgttctttaatttgacctgggttgccgggaaacaaaagggaagaaaaatgtcaagcaccaataaattcatggatgacatgaatgggaatggggattcatatgggacggtgaaccggaggttcaaagatcgagccgagcaagtggcgaaaacgaaggagattttgtccaaacaagcggttcaaacgaaggaaatgttgtctgaaacaagctgttaagatcgctaaacaagctgaagaacacgagcgctntatcaataaggtgactcatcttttgggggttcttggatttggagggttttgctttctattgtgagcaagaccacaagatattccttatgtatattgggtgttctatgttacctttgttcctcttagatggatattctaccgttttaagaaatggcattattatcttctggatttctgcttattatc

SEQ ID NO: 4494 - DNA, 472 bp, Gossypium hirsutum
  Clone ID: LIB3493-035-P1-M1-A5
gggatttgacagacaatctttctgtgaaggctaatgctcaggtcacaaatgagccccatatgtcacatggcatggtcaactttgattacaagggtaaagactacaggtctcagtttcaaatgggaaatggtgctttatttggagctagttatatccagagtgtgacaccgcatttatccttagctggtgaagtattttgggctggtcagcaccggaagtcaggccttggatatgctgcccgatatgaaacagataagatggtagctgcagggcaagttgcaagtaccggaatggttgctttgagctatgttcagaaagtttctgagaaggtttctctagcatcagatttcatgtataactacatgacaagagacgtgacggcaagtgtgggctatgattacatccttagacagtgccgcttgagggggaagattgattctaatggatgcactactgcttaccttgaagagcg

SEQ ID NO: 4495 - DNA, 481 bp, Gossypium hirsutum
  unsure (1)..(481): unsure at all n locations; Clone ID: LIB3493-035-P1-M1-A6
aaaagaagctgagcttctaaagattgaaacactaagcgatggaaaatggaggagaccgtgtgacataaagagagaaagtgaagtactaagggagagacttttttattattattatttctttaattaatgatatggcatgctggagttacaacaagctttgcattgaaggtgtttgctcaatttccttataaagagcgtttccagaattggataatttaattcatccttgaacaaaatatagaacgaaaaggcaatgaaaattctgcgagtttcgctattcttcttcatctttcttgctccatttgcatttgtgactgtgcaagctttcaccggaacgtatggtattaattatggaagaattgccaataacctcccatcaccagatgaagttgtcacgcttcttaaggcagcaaaaataaggaatgttcgaatttatgatgctnatcaaagtgtcctcaaagaatttagtgggacagggctg

SEQ ID NO: 4496 - DNA, 473 bp, Gossypium hirsutum
  Clone ID: LIB3493-035-P1-M1-A8
gataattttgcaattgtgtttgcggctatgggtgtaaacatggagactgcacagtttttcaaacgtgactttgaggaaaatggctcaatggagagggtgacccttttcctaaacctggctaatgatcccacaattgaacgtattattactcctcgtatagctctcactactgcagaatacttggcatatgaatgcgggaagcatgttcttgtcatccttacagacatgagttcttatgctgatgctctccgtgaggtgtctgctgcccgagaagaagtacctggaagacgtggatatcctgggtacatgtatacagatttggccacaatatacgagcgtgctggacgaattgaagggagaaagggttctatcacacagattccaattcttactatgccaaatgatgatattacacatcccactccagatcttactggatatatcacagaggggcaaatatacattgacagaca

SEQ ID NO: 4497 - DNA, 468 bp, Gossypium hirsutum
  Clone ID: LIB3493-035-P1-M1-A9
cggacgcgtgggggaccaccctacctcttggatgtggtgtttaccttgggccggatattggtacaacacctcataccaaacggctacgcaaatgacaccttttgaagtgtagtatggtcgctcccatctacaatagcacggtatgttaaggacgacagcggtcaccctctcattgatgctcagttactcgaacgagaccatgttttacagctgctcaaaataaatttagcccaagctcaggcttggatgaagttctatgctgataaacatcactgagatatcagtttcaatggcggggactgggtatatgttaaattgcaaccttatcgacaatcttctatacgggtgcagcgccattcaaagctcggtcacagatattttggtccatattaggtcctcaaacgtgttggtccagtcgcatatgagctcgacctgccttctacggctcgtatccatcccgtatttcat

SEQ ID NO: 4498 - DNA, 479 bp, Gossypium hirsutum
  Clone ID: LIB3493-035-P1-M1-B1
cggacgcgtggggagttttcgcttcacttttttaatctgtcgcgtttcattgactaatttggctgataaaatcattcatctgagtgttttaaaattttgatttgggcttaatcaatctctgttttttctcggtttcagctgccatggctaccgacccttcaccccaaatcccaatgagggccagttcaaagagctcaaacaattcgatacacccagtggatgtggaaaccccacctgttaggactccaacaccaatcatttacagagaaatcaagcatttcaggaaatggatacctgggtgggtcctgcttttggtggtgctaaccctggtatggttatcattaccctgtacgtcaacaatttgtcccaagaattccgtttcttgcgttgctgatttcttaggcaaattttcctttaagcctttaaaggagattccttttttgggtcctctttccgcaaccttgttaaaaatggggcct

SEQ ID NO: 4499 - DNA, 476 bp, Gossypium hirsutum
  Clone ID: LIB3493-035-P1-M1-B10
tttgaaaacaccccctgaatttgcccatgttggatcgaaaatatttggtacttttatctcatttttgaagagcaaggatgcaaacaatggatcagagcaggatttggttaatgaactgaaagcattggatgaacatcttaagggacatgggccgttcattgctggggaaaagattacggctgttgatttaggtttgggaccaaagctgtaccatctcgagatcacacttggccattttaagaagtggactgttcctgaaagcttgacttatgtccacaattacatgaagtcgattttcggtcgggaatctttcgtgaaaactaacgctgcgaaggaacatgtgatcgagggatgggcaccgaaggtcaatgcatgaattttacttcaaaagctttaggtttttcaaactctttctagagcatataaactatgaaagtgtgtagaggctgtgaaaactagatgaaaactgggtgttc

SEQ ID NO: 4500 - DNA, 460 bp, Gossypium hirsutum
  Clone ID: LIB3493-035-P1-M1-B11
caactttcgattacctttttcttaacctcaaagggaggtctgaatctatacaaaaaaaactaaccaaaatctatctccatttcaatttcgcactgaacccaaaaaaaccagagtccctttctcagaaaagagatggcaatgaaccatgcggcagcggtgaaggtggggttaggtttactaggtctatgtttattcggctacatagttggtccaccactatactggcatctcatggaaggcttggctgccgtcagccgtacttccaacacttgccccccgtgtctttgtgattgttcttctcagccacttctcacactccctgaaggactgagcaatgcttcctttgcagattgcgcaaagcatgacccggaagtgaccgaggatactgagaagaactctgcaaaacttttaatggaggaactgaagctaagagaagctgaagctttggaaagtcagcgac

SEQ ID NO: 4501 - DNA, 459 bp, Gossypium hirsutum
  Clone ID: LIB3493-035-P1-M1-B12
cagcgtgcaaagtcgatgaagttcaaggatggggagcatgatatcctctggtcatcccgtcaaggaatatattgattctgctgttagacatgtccttcttaggcagggtgtgctgggtatcaaagttaaaatcatgctggattgggatccaaagggcaagcagggtccaatgaccccattgcctgatctcgtcaccatccaccctcccaaggaagaggaagagtatacagaaaagaaggactttgaaccgcttgctcccccaaccaatatcgaggttcctgttgtggtttagagcccaccccaaatgagccttgaatgtagtgtttcactcaagttttcaactatttagttaaaggagatcactagatttctgccagtacggattactattttgcgaatgaggtggattttggtcgtgtttagtgtacttggtatattttaaaggaatattattaagct

SEQ ID NO: 4502 - DNA, 438 bp, Gossypium hirsutum
  Clone ID: LIB3493-035-P1-M1-B2
gtgggaggttatttcagagtacattggtacgggtcggtctgtggaagagattctgaaagctaccaaaacagtacttctccagaagcctgatgctaccaaagcatttgactcttttctcgagaagaggaaaccagcggctactattgcatctccactttccactagggaggaagtagaaggggtttctatgccttcaaggactgaaaacacaactgtgaagacaagcagccctgaagactctggtaaagctgcaagtaatcctgtcgatgtggtttctggcaatggtgtttcatcgagttcagaacaagatgtatggtctgctgtacaagaaagagcactgattcaagctctgaagacattcccaaaggaaaccagtcagcgttgggaacgagtagccactgctgttcccgggaagactctaaaccaatgcgcgaaaaa

SEQ ID NO: 4503 - DNA, 143 bp, Gossypium hirsutum
  Clone ID: LIB3493-035-P1-M1-B3
ctcaattttcgacccacacctccccttccacgttatttcacagtacattcatacctatcgggcttgtgctgataataataatgaggccttaccctcttcttctcctattaactttcccttcactgcaactcctctgcttctcc

SEQ ID NO: 4504 - DNA, 417 bp, Gossypium hirsutum
  Clone ID: LIB3493-035-P1-M1-B4
aatgaatacacagctgcttaatcaaaagtctgaaatgttggaggagtatttctgcatttttattgattcagatgggaatttatctagactgccaattctacttgaccagtacactccagacatggatcgtgttcctgaatttgtgctatgtttgggcaatgatgttgagtgggaagaagaaaaaaattgcttccaatcacttgcagctgctcttgggaatttttatgctatgcatccgcctatgttgccaaatccatcaggcaaaggattggaattttacagaaaaaggaaacatgggaagcatactcaagatggaggaaattcttgtcatgtggatggtacagcagaagaggatgaattcgaacatgaactactgtcagaggctgagactgcatgggcccagcgtgaatggtcaat

SEQ ID NO: 4505 - DNA, 479 bp, Gossypium hirsutum
  unsure (1)..(479): unsure at all n locations; Clone ID: LIB3493-035-P1-M1-B5
ggaaaaataaagtacattggtatatctgaagctagccgcgaagctataaggagggcacacgctgttcatcctcttactgccgtacaacttgagtggtcgctttggactcgtgatgttgaggaagaactaattcccctttgcagggaactcggaattgggattgttgcatatagtccccttggtcatggtttctttgccggtaaagcaaaggaggatacctcgaatagttctctggaagtgtacccaaggtttcaaggagaaaacttggagcaaaataggatcctatattcgaaagtagagaagttggctgaaaagcatggatgtacaccggcacaacttgcacttgcctgggttcttcaccaaggggatgatgtttctcctattcccggaacaaccaagattaaaaatctagacagcaacattgaatcagtgaaagtaaagctgacaaaagaagattngaaagaaatttcagatgcgat

SEQ ID NO: 4506 - DNA, 478 bp, Gossypium hirsutum
  Clone ID: LIB3493-035-P1-M1-B6
ctttgacaacttcgaaaagactttagagttctgtactgcccttaaggattgcctcgagcatgttcgaaacaatcacggaattattgagtcggcgcttaaatgttatgatgaagaggataaattagaagtccggaccgtcgaggaaaattctgttaaggccttgggggaactgaggaagttcaaagaagctgaagaacctttcgttaagcagttccttgtactaaaaaaaatggcccataggcggtacgaatcgatgcaagggaaggtgcgtgctcggaagaaaacgctcaaaaagaaattggaatcatgggaaacatggaggagggtgacaatggccttttttgttgccgcttttatttccgtgttggttttttccgtggcggaggcaaccaaatccgcaaagcctgtaataacagctttggcaggtgcgtcgacggctgctatagttccgctgggaacatggtgcaataagtggtgg

SEQ ID NO: 4507 - DNA, 471 bp, Gossypium hirsutum
  unsure (1)..(471): unsure at all n locations; Clone ID: LIB3493-035-P1-M1-B7
cttttgggtatttgtttcgaaaaagttgttccgtgagggcgtgatgattgtggtagctcgtggggatagaagcggagaggatggcatcccaatgctactgaagatcccacgcatgtttgatccatggggtggttatagcataataggattcggtgacatccttttacctggactgttgataacattttcactcaggtatgattggctggctaacaagactcttcgagctggctacttcttgtgggcaatgattgcttacggcttangtcttctcattacatatgtggctctaaatttaatggatggacatggtcaaccagcactcctttacattgtcccttttacactaggaacctttttaaccctaggaaaaaagagaggtgatctaagagttctctggacaagaggagaaccagaaagaccctgtccccatattcgacttgaacaccaacatcatgaagagctggacga

SEQ ID NO: 4508 - DNA, 473 bp, Gossypium hirsutum
  Clone ID: LIB3493-035-P1-M1-B8
gtctttcaggctggagatgcactgatacagttgtatggtaattttatcactgactttgagaccaagattaatcttctcaagcttgcacattttgctgttatagtttctcggcagtattctgacaaagaagcttctactagttatcttgaaggtgtgatcgaaaagcttcaggctactaaagagcagcgcatagaagagccaattatttatattaagatgcaaattgccaaatttaagcttgagcagggtgaccaaaaggagtgcaagaaacttcttgatgatggaaagagtactcttgacagtatgactgacatagatccttctgtatatgctagctattattgggtttcatctcaataccataaatttcgtcaagaatttgctgacttctacagaagtgctctcctttatcttgcatacacatctgtggcgtccctgtcagaatcctttaagctggatttggcatttgatct

SEQ ID NO: 4509 - DNA, 475 bp, Gossypium hirsutum
  Clone ID: LIB3493-035-P1-M1-B9
agaaaaatttacaatcatcatcagatctattgttcttagactgatgatgataatgaggcgttacgctcttcttctcctattagctttcgcttcgctgcaactcctctgcttcgccgctgatgttgacgaggtgttctatgattcatttgaagagtcatttgatggacgatggatcgtttctgataaagatgattataaaggcgtgtggaagcattccaagagcgaggggcatgatgactatggtcttctcgtgagtgagatggcaaagaagtatgcaatagtgaaagagcttgatgaggctgtgaatctcaaagaaggtaccactgtgcttcagttcgagactcgcctacagagtggactggaatgtggtggtgcatatttgaaatatcttcgtcctcaagatgctggatggaagcctaatgagtttgacaatgaatccccttactctatcatgtctggacccgacaaatgtggg

SEQ ID NO: 4510 - DNA, 247 bp, Gossypium hirsutum
  Clone ID: LIB3493-035-P1-M1-C1
cttttattttattttttccttgtaaatcctcttgaatcatcgagatgtcttcgatcgtggttaagaaattagtgggattggaattataaggatgatagtctttacatatccctttcacgtggattttgggtttaaaaagtagtttaaatatgattgagctttcttgctttgttatggtagatgttacataatgtatggtaatacatattttggtgactttgtgatttcaattgctgatctaaaagac

SEQ ID NO: 4511 - DNA, 470 bp, Gossypium hirsutum
  unsure (1)..(470): unsure at all n locations; Clone ID: LIB3493-035-P1-M1-C10
cccatccaaaaccaaaccctttccaccgatcaggatggacttttagctaaaaccctcgccgacctcctacgcttttccgacatgaccgacccttccatcccactctctgcccttaacctctctcacggttccattatattcctctactaccacggcgaacgcaccgtccgcggtggccccaccgtttcacccgccggatcgttcggccgtaagatgaccatggatgacctcatcgctaaacaaacacggatcacccgccaggaatcccctcactgtgactctgtttcctttgaccgcgattcggccaacgctttccaacgtttcgtcagcgaaacgctggcgtttgcttcgaaacgcggcgggttcatgtacggcaccgtcacggatgaaggtagagtggaagttgattntatttacgagccgcctcagcaaggcttggaagatgatttggtccttttgagggatcctga

SEQ ID NO: 4512 - DNA, 479 bp, Gossypium hirsutum
  Clone ID: LIB3493-035-P1-M1-C11
taacagtccaagagttgattaaggatgagaacggcagagcggcacttggcgtttgccaagaggtgttggacttagccattgatgactttcaaaagtcattcgacatgctaggggaatacgaaatgagcaagatcggaaaataccttttggaactaaagacctggctaagcggtgcattcacgagtcaacagacatgtatagactcatttgcggaatcaagtaacgaatcatcgcagaagatgcaatcaatcttgaagactagcatggagattactagcaatgctttagcgatgcttaatgggttatccaccatcgtgaaggaacttaacattccaaacgtcggcaacatcgacaccacagaggttaatcgtaagcttttgtcggctgaggatatgcctgagtggattagtcaagctgaccgaaaactccttcaagcaaagccaatggatttgaagcctaacgttgtggtttctaaagat

SEQ ID NO: 4513 - DNA, 475 bp, Gossypium hirsutum
  Clone ID: LIB3493-035-P1-M1-C12
cggacgcgtgggcggacgcgtgggtgagttttgggtgtagggatttgcgggtggagaagacgagagctcatctctctgcttcaaagctcctgtccaggtagaattctcttcttcctttgcgttgtgttctttgttgttcagtcgccatggcttcaaagcggattttgaaggaactcaaggatttgcagaaagatccacccacttcttgcagtgctggtccagtagctgaagacatgtttcattggcaagcaacaatcatgggaccctcagatagcccttatgctggaggtgtgtttttagttaccatccatttccctccagattatcctttcaagcctcctaaggtcacgtttaggaccaaggtcttccatcctaacatcaacagcaatggaagcatttgtcttgatatcctcaaagaacaatggagccctgcactaaccatttccaaggttctgctctcaatctgctcgttgct

SEQ ID NO: 4514 - DNA, 481 bp, Gossypium hirsutum
  Clone ID: LIB3493-035-P1-M1-C2
cttaaaaagtacttgacggaaacaagcaaagtacccaatagcgtagccaaagtagtggtgcttttaatctgcgtatatgtgaacggatttgcatggtcatggggtcctttggggtggctaatatctagcgaagtcttcccattggaaacacgaacttcaggctatttctttgcggtcgccaccaacatgctttgcacattcatcatagctcaagcattcctcagcatgctttgccacatgcgagcctacatttacttcttcttcgccgcctggctcatcgtcatgtccattttcgtaatggcgatgctccctgagaccaaaggagtcccccttgatgaaatggttgaaaaagtatggaagaaacactggttctggaaaagctttttcaaatctagcgacattgaaagaccgaaagctatggtccagcttgagcatcaggaaaaaccaaaccattaaaaacacctttgtacatctctttgga

SEQ ID NO: 4515 - DNA, 330 bp, Gossypium hirsutum
  unsure (1)..(330): unsure at all n locations; Clone ID: LIB3493-035-P1-M1-C3
acccaaaattccattctctacccactctttcacttaaaaattacttttctataaacaatcaaanttcccagtacgatattttaaataatggtgcttttaatctacatatattttaacncatttttcatatcattttcatcctttctattttcttatatttttctatttttctctatattaaacattttctttagtctatttttttacaaatctctctaacatacttttctcattcatcataatattattcattattctatattctataatatattcaaattctcatttacttatttttttccatttctattatctttatattcatttttt

SEQ ID NO: 4516 - DNA, 480 bp, Gossypium hirsutum
  Clone ID: LIB3493-035-P1-M1-C4
atcattgaaagatttaaaaagaaaaaaagagagatggcgtctgtaataaaatctgcaatcttaattctgtcggtgtttttatctgtacgcttcagttcgggtgttaggttgctccaggaacagcccaatgatgaccccaaaaacatggacgctattcctcccattgatgcactcaaccctaccgagttgaatggacccggtgttggcattcacgaagatcatgttgtcccaaaaggtgctgaaattggtactcttggttttggttttgaaggtggtcctgataaatgttgttcttctggatgttccggtaattgtaatcctggtggtttcgttctaccatttcctcaaattccagaaatcccaagaattccagaaatcccacaaatcccacagatcccacaaatcccacaaattccactaatcccacagatcccacaagtcccacagatcccacaagtcccaaaaatcccactaatgcca

SEQ ID NO: 4517 - DNA, 480 bp, Gossypium hirsutum
  Clone ID: LIB3493-035-P1-M1-C5
ttttggagttgagctaaccaacatttttacgttatgcggaaggtgtgttcacagattctttgatttttccaaagctaccgcaaagagagccttcagagttatccaggtttttcttggatatttttacactgtttcaatcatgttttctgatctaagctgattttaatgtaattatgacatcatagtaaattttgtttgaatgatgacttaggatactcacaacgtacgatctgtatctttccatccatctggtgatttccttctagcaggaactgatcatccaatagcacatttatacgatgttaataccttccaatgttatctatctgcaaattcccctgagattggtgttaatggagccataaaccaggtataaaatatcaccatcttcaaaacataaggatctttcttccatttgttaaaagataaatcaagacaatgtagtccgtaaatcaatctgtttcatgcacaggtaagata

SEQ ID NO: 4518 - DNA, 264 bp, Gossypium hirsutum
  unsure (1)..(264): unsure at all n locations; Clone ID: LIB3493-035-P1-M1-C6
gatggtttgcctctcccaagtagcggtgcaaagccaagactactcanagagcttaccatatgatcccaggccggttaaggtcactaatcttcacttctttttgcacgaaactctccgcggtaagaacccaacagtagtcatggtagcccaagctaacaacacaagcaacgacaactactcatcagtgccatttggcaccctatatgccattgatgatctcctcaagataggtcctggggacaactcaaaggtgattgggaatgc

SEQ ID NO: 4519 - DNA, 479 bp, Gossypium hirsutum
  Clone ID: LIB3493-035-P1-M1-C7
gcttgggtgccttgcactggctgcattggctgcgtctggtactgcttttgactttgctaaatccaccactttcaagacccttggctgccaagctgctcaatgcaagcaggtgccaaaccccacttgcggtggaagcgcgtgcacattcaacatgacctacggtggctcaaccatagccggtaacctttcacaggacaccacaaccttagccactgacccaatcccaaactacactttcggttgcctccaaaagacagcaggcagctcagtgccaccacagggcgtattgggcttgggccgaggcccattatccctcctttcccaatcccaaaatttgtaccagtcaacattttcatattgcttgcctagcattaggtcacctaacttttctgggtcattgagacttggaccaagtgggcaacctgtgaggatcaaatacaccccgttgctcaagaaccctaggagaccctcactttatt

SEQ ID NO: 4520 - DNA, 370 bp, Gossypium hirsutum
  Clone ID: LIB3493-035-P1-M1-C8
cttcttgctccggatgggacaacgtaacctcgtggtgtggctcttccccagagctagccaaagaagttttgcacacccaaggagttgagttcggttccaggacaaggaatgtcgtgtttgatatcttcacggggaaaggacaggacatggttttcaccgtgtacggtgagcactggcgcaagatgagaaggatcatgaccgtccctttcttcaccaacaaggtcgtgcaacagtacagacatggatgggaagccgaggttgccagtgtggttgaagacttgaagaataacccagaagcggccaccaatgggattgttttaaggaggagattgcagctcatgatgtacaataacatgtataggaacatgtt

SEQ ID NO: 4521 - DNA, 476 bp, Gossypium hirsutum
  Clone ID: LIB3493-035-P1-M1-C9
caaaggctgtctagatccggagaatttcaaagagtttggacttgtgaagcgccaacagctgagccataatgtggcgaagttcacatttgaacttcctacacctacttcagttttgggtcttcccattggacagcatataagttgcaggggcaaggatagccaaggtgaagaagttattaaaccatatacacctacaacattggattctgatgttggttatttcgaattagttattaagatgtatcctcaagggagaatgtcgcaccatttcagagagctgcgcgttggtgattatcttgctgtgaagggacccaaggggaggttcaggtatcaacccggtgaagttagagcattcgggatgattgctggaggctccggcattacaccaatgttccaagtagccagagctatattggagaaccccgaagacacgacaaatgtacaccttatctatgcaaacgtcacatacgaagaca

SEQ ID NO: 4522 - DNA, 413 bp, Gossypium hirsutum
  unsure (1)..(413): unsure at all n locations; Clone ID: LIB3493-035-P1-M1-D1
gcttttcatactcatttagcccctttcattagcatcaaaatgactccagttttctttatcactgaaaaatgtcttgctgtggtggaaactgtggctgcggtactggctgcaagtgtggcagtggctgtggaggatgcaagatgtatccagacctgaacgctgccgagatgaccacaactgagactctggttcttggggtagcaccccagaaagcacactttgagggagctgagatggaattcggggctgagaacggcttgcagtgtggagacaactgcacctgcaaccctngcaattgtaatgattagagaccaaagccaaaagctcctggaagcagaggcgcctttgtctttaagaaataatatgttttgttggttatgtgtttttagaataaagtagccatggcttgtcgt

SEQ ID NO: 4523 - DNA, 479 bp, Gossypium hirsutum
  Clone ID: LIB3493-035-P1-M1-D10
gaaaattttactgcgaaatttcatttccgttttcgattttttcctccaatttgtatttgaagtgatggatgccggatcaaaggtgaagaaaggagctggaggaaggaaaggcggcggtccaaagaagaagccggtttctcgttcggtgaaagccggattacagtttcccgttggtcgaattggacgatacttgaagaaaggacgatactctcaacgtgtgggaaccggtgctccggtttaccttgctgctgttcttgaataccttgctgctgaggttcttgagttagctggtaatgctgcaagagacaacaagaagaataggatcattccaaggcatgttctattagcagtgagaaacgatgaagagcttgggaagcttttagctggtgtgactattgctcatggtggtgttttacccaatattaacccagttcttttaccaaagaaaaacgagaaagcggctgcaaaagagcctaagt

SEQ ID NO: 4524 - DNA, 480 bp, Gossypium hirsutum
  Clone ID: LIB3493-035-P1-M1-D11
ttgagattatcaatttgaagccttcttcgaatgggctcattcaagatgcaaattttcgtcaagaccctcaccggaaagaccatcacattggaggtggagagttctgatactattgacaatgtaaaggccaagattcaggacaaggaaggcatccccccagaccagcaaaggttgatcttcgctggtaagcaacttgaggatggccgcacgttggctgattacaacatccagaaggagtccacactccacttagtgcttcgcctccgtggaggaatgcaaatttttgttaagactttgactgggaagaccattacattggaggtagagagttcagataccattgataatgttaaggcaaaaattcaggacaaggagggaattcccccagaccaacagaggctgatttttgctggtaagcaactggaggatggccgtaccctggctgactataacatccagaaggagtccaccctccacttg

SEQ ID NO: 4525 - DNA, 478 bp, Gossypium hirsutum
  Clone ID: LIB3493-035-P1-M1-D12
cattttcatactattcctccaaccgcgccaccgagcgggttccccgaaggctgattccatggctgcccggagctttgttctttggcttcacgggcttggtgactctggtccagccaatgaacccatcaagacactctttaggtcttccgagttccgaaacaccaaatggtctttcccttctgcccctgaaaaccctgtcacctgcaattatggaatgcgaatgccttcttggttcgacattcaggagattcctgtcacagccgattctccaaaagctgaaagtgatgtccttaaagcagttcagaatgtgcatgcgatgatagacaaagaagtagctgctgggacggatcctaataacgtatttgtgtgtggatttagtcaaggaggtgccttgaccttggctagtgttttgttgtacccaaaaaagcttggtggaggtgcagtcttcagtggatgggttcctttcaattcttcaatg

SEQ ID NO: 4526 - DNA, 167 bp, Gossypium hirsutum
  Clone ID: LIB3493-035-P1-M1-D2
cggacgcgtgggtttcttttggctttagttttagtaatgtttgtctctgaactaaccttctttatcaatttagttttgtgtgaatcgttatctctgtaaaccttgatacttttcagtgtttatcatggagaaagctcaatattgcttggaataataatttatgctcc

SEQ ID NO: 4527 - DNA, 473 bp, Gossypium hirsutum
  Clone ID: LIB3493-035-P1-M1-D3
cgaagatgctcccacatacatcaaaactgttgacgatggaaggcatgagctctttcttgaatacgtggcactcccattgcctttgacgccaacttatgcggaagaagtgaatggtgcaaacaatggaaagaccaacgaatctcatcaaggtaatcttctttcggaccatgggcttgcagattttgatgtctacattatggagactaatagccagcagatgaagtctgagctggatcagtacttggaagagtccctgttacctcgtgtccaagagtttgatgtgttgggttggtggaagctgaacaagatgaagtatccaactctttccaagatggctcgcgacattttgtcgattccggtgtctgctgctgccaccgaatcaatctttgatatcacagacaagcaactagatgaatatcgtagctctttgcgaccggagacggtggaagcactaatctgtgccaaggactggc

SEQ ID NO: 4528 - DNA, 385 bp, Gossypium hirsutum
  Clone ID: LIB3493-035-P1-M1-D4
ctcactccgccatcttcaataatttcttccgttgatcggtggtagagattagctttttaatttttcattatgggaaagatcaagatcggaatcaatggatttggaaggatcgggcgtttggttgcgagagttgctctccaaagcgatgatattgagctcgttgctgttaacgatcctttcatcaccactgaatacatgacctacatgtttaagtacgacagtgttcacggtcaatggaagcatcatgagcttaaggtgaaggactcaaagacccttctctttggtgaaaagcctgtcacagttttcggtatcagaaaccctgaggaaatcccatgggctgaggctggagctgagtatgttgttgagtctactggggtttttactg

SEQ ID NO: 4529 - DNA, 478 bp, Gossypium hirsutum
  Clone ID: LIB3493-035-P1-M1-D5
ggaaattgaggaaaaaaaaaatctttggcctttgtttgacaaatctagctcgtagaattgaacggcagccactaaaaaaatacgttcggtgattaatagattttttttactcaagaaatggcgggaagagctcaaattccgacaagtaagtcagcactaattgccatgattgctgatgaggatacagtaactggatttttgatggctggagttggaaatgtggatttaaggagaaaaacaaactatctaatcgttgattcaaaaacaacagtgaaagcaattgaagatacattcaaagactacaccacaagggaggatattgcaattattttgatcagtcaatatgttgcaaacatgataaggtttctagttgatagctacaataagccggttcctgcaattctggaaatcccttccaaagatcatccttatgatcctgctcatgattctgttctctcccgtgtgaagtatctctttt

SEQ ID NO: 4530 - DNA, 323 bp, Gossypium hirsutum
  Clone ID: LIB3493-035-P1-M1-D6
gcatggatgaggatgccccagccagtggaaccggcgcaggccccaaaattgaggaagtggactaagaaatttctctccattcttttcgaccctttcatttgttcctttagtcgtttcatgttggtttcttttttattggactttagttattgttttctggctttgaacatgtttttgagggttttgtttgaagccaatttttgagtattttagttattggaaacattgatctctggtgttgtacaaattttccattgttttctttttgaatcttccatttttatttttattttttgaaatttcagttcttaatttttagttca

SEQ ID NO: 4531 - DNA, 185 bp, Gossypium hirsutum
  Clone ID: LIB3493-035-P1-M1-D7
gacccgctctaactgactatgctcaatccctagccatggatcatgactgtgatgactgtccccgatatcctaaacccacctcgtctgatccaccattccacctgcggagaccgggctttcacaactccacctacgttctaacggagcttactgcgaatctagccttcaacatcttctaccttttg

SEQ ID NO: 4532 - DNA, 460 bp, Gossypium hirsutum
  Clone ID: LIB3493-035-P1-M1-D9
tgcgaaccattttcaacatatccacgtacttatgatggactgcatgccaaccatcttttctctcaatataaaaatagtggagaaggttgccagtttgaggatatcatgcttgagatggaccgcattttaagacctcagggatttgttattattagagatgaggattctattatatcaagaattcaagatcttgctccgaaattcctttgggagtttgaatcacatattctggaaaacaaggagaagcaaagagaaacattgctaatttgcagaaagaagttctgggctgttctttaaaacatgtttctacaaataacaggtgctaacgaagcagctgtatgtatttccaaccctctctataagcgttgtaacttatctaccttgagtctaggttcgtgcttttcgccttttttgtctacacccctgtactttatataaatattaaccttattagtgggag

SEQ ID NO: 4533 - DNA, 422 bp, Gossypium hirsutum
  Clone ID: LIB3493-035-P1-M1-E1
ccagtttctattttctcacaacaaaactgaaaatgtcttcgtgctgcggaagaaactggggctgccgcgctagttgcaagtgtggcaatggctgtaacggatgccgtatgttccctgacataatagagaagactcccactgagactattggtcttggtgtggcaactcagaaaatacactttgagggatctgagatgggagttggggttgagggtggatgcccgtgtggagacaactgcaaatgcaacccttgcacttgcgggaaaaattgaacaacaaagagaagcagagtggcctttgtcattttaactaaataaattctattactttagaatgtatcagcaaatcttcatgaggatttggttcctaattatctgtaatgtggcttttctgctatgtcagaatgtattatgatatttaag

SEQ ID NO: 4534 - DNA, 475 bp, Gossypium hirsutum
  Clone ID: LIB3493-035-P1-M1-E10
attcacggcaatgattcatcgtcatcttcggattcggggtcggatcatgagaaaccggcttccccttcctccgttaaggctaagatttatcggttgtttggaagagagagaccagttcatcatgtgcttggtggtggaaaacctgctgatgtgttcttgtggaggaacaagaagatttcagctggtgtccttggtggagcaactgcaatttgggtcctttttgagttgattgaataccacctacttactttaatatgtcacatttcgatactctgtcttgcactattgtttttgtggtccaatgctcataccttcatccacaagtctccacctcgcatccccgaaattcatttgccagaggagccattcctccaagttgcctctgcattggcaattgaacttaaccagggattgaaacttctgcgggatattgcatctggaagaaatctgaaggagttccttatggttatagctg

SEQ ID NO: 4535 - DNA, 480 bp, Gossypium hirsutum
  Clone ID: LIB3493-035-P1-M1-E11
tcttaaaccatttggtccaaaacaagaatgaatattggatggaggttacacccaaaaccctagctgatgtcaagggtggtactcttatttcttatgaaggaaaagttcagctccttgaaattgctcaagtccctgatgaacatgtcaatgagttcaagtctatagaaaagtttaaaattttcaatacaaacaatttgtgggtcaacctgaatgctatcaagaggcttgtggaagctgatgaactcaagatggagatcattccaaacccaaaggaggtcaatggaatcaaggttcttcaactggaaactgcagctggtgcagcaattaggttctttgatcatgctattggtatcaacgtacctcgatcgcgattccttccagtgaaggcaacttcagatttgcttcttgttcagtctgacctttacaccttagttgatggatttgttatccggaataaagatagagcgaatcctacaaacc

SEQ ID NO: 4536 - DNA, 470 bp, Gossypium hirsutum
  Clone ID: LIB3493-035-P1-M1-E12
gacacttcgagagcaaatgttcaggccctcactgtcgacaataattgcagacaatccaaagattgtaatagtttcaccagatgacacagttttaacgactacaaaaaagatgcaagaatgtcgtataaactctgcagttgtgcttgttgaaaataaaccccgggggattctaacatcaaaggatatattaatgcgggtaatagcacaaaatctgcctccagagaccacttcagtggaacaggttatgactcctaacccagaatgtgcaacactcgacacaccaattgtttctgctttgcataccatgcatgatggcaactttttacacctacctgtgctagatagagatggagaactagtttctattgttgatgtgatcgaagttactcatgccggtgttgctacagttgggaaaaattttggagtcaataatgaggcttgctcaacaatggtgcaaaaatttttgggat

SEQ ID NO: 4537 - DNA, 54 bp, Gossypium hirsutum
  Clone ID: LIB3493-035-P1-M1-E2
cgccaaatgaaggaattcgctttaagggcttggcaattgccggatggtaaaaac

SEQ ID NO: 4538 - DNA, 367 bp, Gossypium hirsutum
  Clone ID: LIB3493-035-P1-M1-E3
ctcaacgctctccttctgtttctggtcaagccaatctgaaagaactccccttttagctgacagctcctctcttgagtactataatgggtaaggagaaggttcacatcaacattgtggtcattggccatgtcgactctgggaagtctacaaccactggtcatttgatctacaagcttggtggtattgacaagcgtgtgattgagaggtttgagaaggaggctgctgagatgaacaaaaagtcatttaagtatgcatgggtgcttgacaagcttaaagccgagcgtgaacgtggtattaccatccatatttccctctgtaaattttggactaccaaatacttctttactgtcatttatgcccccggaca

SEQ ID NO: 4539 - DNA, 484 bp, Gossypium hirsutum
  Clone ID: LIB3493-035-P1-M1-E4
gaaataagtgtccattgggtgatcaagatgaagtagagttggacgatgtctggtttgcctatccttcccgtccgaaccatatggtactcaagggaataacacttaaactgcaaccaggatcaaaagttgctcttgttggccctagtggtggaggaaaaagcacgatcgcaaacttgatcgaaagattttatgatccaattaagggaaaaattctattgaatggggttcctttgctagaaatatcacatgaacatcttcatagaaagatcagcatagtaagccaggaacctgtccttttcaactgctcaatagagaaaaacatagcttacggatgcgaaggccgagtcaatattaccgatattgaaaacgcagcaaaaatggccaatgcacatgaattcatatcgaagttcccagacaagtatcaaactcatgtcggagagcgcggagtacgactttctggtggacagaagcagagggtagcgat

SEQ ID NO: 4540 - DNA, 482 bp, Gossypium hirsutum
  Clone ID: LIB3493-035-P1-M1-E5
tatctacaaccatgttactggtctcttggatcctcctgagcgaattaagcctccaaagatccttgtcatcgaaggactgcaccccatgtttgatgaacgtgtgagggatctgttagacttcagtatctatttggatatcagcaatgaggtcaaatttgcatggaaaattcagagggacatggctgagagaggacacagccttgaaagcattaaagccagtattgaagccagaaagcccgatttcgatgcctttatcgatcctcaaaagcaatacgccgatgcagtaatcgaagtgctcccaactcagctgatcccagatgacaatgaggggaaggttttgagagtgaggttgataatgaaagaaggggtggagcatttcagtccagtttacctgtttgatgaaggctcaaccatctcatggataccatgtggaaggaagctcacttgttcttaccctggcatcaaattctcctatggccctg

SEQ ID NO: 4541 - DNA, 318 bp, Gossypium hirsutum
  Clone ID: LIB3493-035-P1-M1-E6
gaaaaaccttaagtgtttttttctttttctttttcttgtttgccctcagaaagagatctcttcttcaatttcttataaacgcttccaagttggaatttttggctggaaattcttcgcctctttctctccgccgccgcttcaaaagggaaaattttctgttcttttttttcccttaatcgtttaactttatttttgttcattaaaactttttcctttcacttacatgtcacttttccccttgtctcttccatatttctcaaattagggtttatgaaattggtatgacttccaggttttttttcgtttttatattggata

SEQ ID NO: 4542 - DNA, 423 bp, Gossypium hirsutum
  unsure (1)..(423): unsure at all n locations; Clone ID: LIB3493-035-P1-M1-E7
gcctactcatcataggcttataattttttcttggctgttggtaaaaaatctaaaagaaagaaagggatatggaagggaactctggcggtggcggcggagtaaacagaagaggcggtggccganaaagaggaggaaacgatgtggagctggtttgcaaaacacttcaggtagaacacaagctggtctacttcgatctcaaggagaacccacgcgggcgttatcttaaaatctcggaaaagacatcggctaccaggtcaaccatcatcgtcccttcttccggcatctcctggttcctcgatcttttcaattactacgtcaactccgacgaccacgacctcttcagcaaggaattgcagcttgacactaaagtcttttactttgacattggcgagaaccggaggggtcggtttcttgaaggtgtct

SEQ ID NO: 4543 - DNA, 315 bp, Gossypium hirsutum
  Clone ID: LIB3493-035-P1-M1-E8
tagaaagggtagggattttaattcagggaataggggagcaagttgtaataacttgagtgcattatataagaaattgatattgatgttgaggtccttatacgtgactgtcaggcttttacctgcatacaacatttttcgtgatctgaattcatctggtctaattcgttcctttaagcttgttcctagggtatcttcttttgttgaacccttgactcgtaaagaagaggtagatatgcagagattttggtttacccctgtggacacttcttgtggaaggctttgcctttcagttttggaatattcaataatctcaga

SEQ ID NO: 4544 - DNA, 325 bp, Gossypium hirsutum
  Clone ID: LIB3493-035-P1-M1-E9
gctagccaacaacaaccattcacattcatcattctttgttattttgctttatatgccatgttacccaattcttgaaagtaaccgttgcggctcggattgattggcggcttgataatcggagtcggagaaaatgcggggaaaggcggtttccgggaaagcaattctggtattgagcctggctagctttcttgcaggttccctaataactagccgaacttggacttttcaatctcataacaacacccatcctattgggaaccatgttactgctagcaataaattgggagaatttgatcacaaattacgtaaattaggtgaaggaaaa

SEQ ID NO: 4545 - DNA, 467 bp, Gossypium hirsutum
  Clone ID: LIB3493-035-P1-M1-F10
tcttcttccacttgagtagccggctctcgcaacaaaaccagtctttgagttaacacagccgcatttcaccaggatggctagagggttgaagaaacatttgaagaggctcaatgcccctaggcattggatgcttgacaagcttggtggtgcttttgcacccaagccatcatctggtcctcacaagtctagggaatgcttgccattgatcctcattcttcgaaacagattgaaatatgctctgacctatagagaagtcattgctattctcatgcagaggcatgttatggtagatgggaaggttagaactgataagacctaccctgctggtttcatggatgttgtttcgattcctaaaacaaacgaggacttccgtcttctttacgacactaaaggacgtttctgtctccatgctatcactggcgatgaaaccaagtttaagctttgcaaggttcgatccgtccaatttg

SEQ ID NO: 4546 - DNA, 475 bp, Gossypium hirsutum
  Clone ID: LIB3493-035-P1-M1-F11
cccacgcgtccgcttatcttcccccgaaaccaaaatcacaactttgcccaatggccttcgtgtggcaaccgaatctaccctgtcttcccgcacagccacggttggggtctggatcgatgcaggatcgagatttgagaccgaggagacgaatgggacagcgcatttcttggaacatatgatatttaaagggacagagaagaggtctgcgagggaactggaggaagagattgagaatatgggaggccatttgaatgcttatacttccagggaacagacgacttattacgctaaagttatggacaaagatgtctttaaagcgttggatatattggccgatattttgcagaattcgaagtttgaggaacacagaattagtagggaaagggatgtgattctaaaggaaatggaagaggttgagggtcaaacggaggaagttatttttgaccatttgcattcaactgctttccagtacaca

SEQ ID NO: 4547 - DNA, 326 bp, Gossypium hirsutum
  Clone ID: LIB3493-035-P1-M1-F12
atgacgaagcaaaggataaggcctttgaacttgagatgagttgggtctgtgacgagtccaagcaacaacatcaaaaggttcccgatgaccttttggaggaggctaaggctgcggctaggattgccctagaagagatggatgccgattaaacatgagtggagccagaatactgttgcaatggtattttgatcttcactaatttctcatctgtcataaacttgatgtttgatttatgatctaagtcattgactggttaaacatgtttccttgtattatttcatcaagaagatctgccggcttttttattagggccttcgatttcgaac

SEQ ID NO: 4548 - DNA, 168 bp, Gossypium hirsutum
  unsure (1)..(168): unsure at all n locations; Clone ID: LIB3493-035-P1-M1-F2
cggacgcgtgggctacaacactgctcgtggtgttcagaaggttctncaaaactacaagaacttgcaagatattattgctatttttggngatggacgagctttagtgaaaaatgataaattaactgttgcacgtcctcgtaagatccaaaggtttttgagccagccttt

SEQ ID NO: 4549 - DNA, 249 bp, Gossypium hirsutum
  Clone ID: LIB3493-035-P1-M1-F3
cggacgcgtgggaaaacataagagtgctagaacagaggaggatctatagtttcctggaagagagcacgtaaaatttggagatgtggttgaagctccaccaaagttggttacagtacccaagggatcaacggccttacttgatgcttcaaaggagaggcttaggttacaggctattgaggcttataggaatcgcaaaggatggagctcaagaccaggggggcctcaactacctccagtgactgcatgaaa

SEQ ID NO: 4550 - DNA, 419 bp, Gossypium hirsutum
  Clone ID: LIB3493-035-P1-M1-F4
cggacgcgtgggcggaggtgcaaactctgagctataaccataggaagaataaaggtctaccgaaaaaggtagtggaagcattcaagagcagtcactcatccaaaccgagaacaataccgagattatggtctagttccatagttgaggattcttcttggggtccatgccatgatacagtcaacggtcctaattcactcaataaaatggatctcttagaggaagaattttcaccgaatcttgaattggccaccattgttgtgaggaaccatttgcctaaaaatcctcttccggaagttggaggttggggcttaaagttcctcaagaaagcgggggttactgcagcagcctcggttccatgcgattgttctctgaataccgatgattgctcaacaagtacagatatcctagtcccggcaggc

SEQ ID NO: 4551 - DNA, 481 bp, Gossypium hirsutum
  unsure (1)..(481): unsure at all n locations; Clone ID: LIB3493-035-P1-M1-F5
caggaggggaactgaagaagttcctacctaggctttgtggtgtccctcctattatatccaaaggacttgttgagggggtctcaggtgaaacttaccaagaggacactatgctttggaagaagcatgttaatgcttacaaaaggataaatagattgattggtactgcaagatacagaaacgtgatggacatgaatgctggtcttggaggatttgcagcagctctcgaatcacccaagtcttgggtgatgaatgttgtgcccacaattggcaaggacaccttaggtgtgatctatgagagaggtctaattggaatatatcatgactggtgcgaaggtttctctacgtatccaagaacatatgaccttatgcatgctaatggtgtctttagcttgtatcaagataagtgtagctttgaagacatccttctggaaatggatcgcattntacggcctgaaggagctgggatattccgggatgatgt

SEQ ID NO: 4552 - DNA, 480 bp, Gossypium hirsutum
  Clone ID: LIB3493-035-P1-M1-F6
gcctatagatcttgatgctgaacaggttaaaagagtggtactgtgaaatcaaggagggtgaacttgatgctattgctgtagttcattcttatgaggatgccatgcctgcaggatctcataagacgaggctaactgctctgaatgttcctcctatgggtttgttctacccaacgcttttgattcctgatttatatcctccaccaccccgttcttggtttcatgactatgaagatatgctggaagaaacatggcatattgaattcccaagaagatctgacatgccagacggtctttatcctggcagtaatgttggtttacaaatgtgggataactatccatttgtctcaatgaaacctaagaaagaagagaaggttggcctagcagaagccataaccagcagtattctttcaactggtcgcatagacttgcaaagaaaattgttttgtagcatacaattgattggtggagtggctttaactg

SEQ ID NO: 4553 - DNA, 410 bp, Gossypium hirsutum
  Clone ID: LIB3493-035-P1-M1-F7
ctactcttgctcttttttgtcttgtttcattgttctgactttctgtaatgaggaacaaaaagggttaccatatcattcacccaattcctaatgaagaacgatttagcagttactattgctattacctcttctgggttgcggttggttactatctctggaaaaaaattctcaccataacgggctacaggttccacccgacagatttcgagctcctccattactatctactaaacaaaaatctcggccgtgattctctggtccaagctatcgctgaattggaagatatttgtggattagagccttggcaattacctggacattcgaatatacactctggcgatcacgtttggtatttcttttaccggccaaagttcaagtaccagaacggttcaaggatcaacaggacaacc

SEQ ID NO: 4554 - DNA, 92 bp, Gossypium hirsutum
  Clone ID: LIB3493-035-P1-M1-F8
cggacgcgtgggtgtatttcatactcatttagcgccgggtcattagcatcgaaatcactccagttttctttatcactgaaaaatgtttgctg

SEQ ID NO: 4555 - DNA, 208 bp, Gossypium hirsutum
  Clone ID: LIB3493-035-P1-M1-F9
gcaatttgtccttcaaaacattttgatatcgagggtgcttggtctggttcaaccaccattcttcctatcaataagccaatcattttatatatcggagttgattccaatggcatccaaacccaaaactatgcagtaccagcaaatttatctgatccatatttgcgtaaatggatcaaacctggaaacaatccactgattgatccttaaa

SEQ ID NO: 4556 - DNA, 67 bp, Gossypium hirsutum
  Clone ID: LIB3493-035-P1-M1-G1
aaacagatataagtttgaaaatgggcagtcactgcgagtggtctgtcaagattccaccgataaaatt

SEQ ID NO: 4557 - DNA, 363 bp, Gossypium hirsutum
  Clone ID: LIB3493-035-P1-M1-G10
caaaacgctacggttccgaagaaatcgttcacggtggagattgcctgtgggtctttcttgattgtttttttagtcaattactttaccggtaaacgtgaaaacgagaaccttgctttggcatgggcagccaaattcgctacaaaaggttctatctttgagaaaaatttcagtcttttgggtgtgggagaaggggaggactcgccgttgctgttaaaagaagggcaaaccgtattcaaattctactcgagtggacgaagatactgccagggattgctggcaacgatggagttaaagagcatacatgatctgatatcaagattgtttaatttggtggtcccttgttaagaataaattactttttaa

SEQ ID NO: 4558 - DNA, 443 bp, Gossypium hirsutum
  Clone ID: LIB3493-035-P1-M1-G11
ctcgccgatgagatcaacactcgacaaaccatgactggtcttgttcttaacaatggagctatgtctgctctcactgctaaacacccactttccgtcgttgaaaacatccttagccttcatgttcttttagattattatgacccacaaaaactccataaaatctccgatggtactacacttactactactctttaccaaaccaccggaaatgctcccggaaatctgggtttcgttaatatcaccgatctacaaggtgggaaagtcgggtttgggtcagccgttcctgggtctaaacttgattcgtcttatactaagtctgttaaacaggtaccgtataatatttctatactggagatcagtgcgccgattattgctcccggtgttttatcagctcctgcaccggcggcttccggggttaacattaccggtttacttgataaagc

SEQ ID NO: 4559 - DNA, 472 bp, Gossypium hirsutum
  Clone ID: LIB3493-035-P1-M1-G12
tggatggatggtatgaacattaacatgaatatgggagactggctgataagcttggtttccttcctgctgatgataaaatgttcagatttgtcttactccttcagcattctatgccaacatctgtcctttctggtgctgttgctaatttaagaggttacggaaaggaggcagcagcttcgttgttctgggttcatatatttgcagttttctccatggcaggatggattattctctatctcaacatactcttttaaaactagcaatcaccagtccttctggtcactaacagcctgagagagcgagtacattacatggatggtttgtcacgccctgcaaccatgaatactgctgatagtattttattttatctcttgataccatttctgtatcagctgattgttacatattcatgttaatgttcataccatcaaacatgggaatggatggatggacctaaatttaattttttatg

SEQ ID NO: 4560 - DNA, 360 bp, Gossypium hirsutum
  Clone ID: LIB3493-035-P1-M1-G2
gggaacccttcttatttccaagatcagggaggagtatccagggcgcatgatgttgacattttcggtcttcccttcgcccaaggtatccgatacagttgttgaaccatacaatgctaccctttctgttcatcagcttgttgagaatgctgatgaatgcatggtgttggacaatgaagctctttatgacatctgctttcgcacccttaagctcgccacttctacctttggtgaccttaaccacctcatctctgctaccatgagtggtgttacatgctgtctacggttccctggacagctgaactctgatctccgtaagctggcggttaaccttatccctttccctcgattacacttcttcat

SEQ ID NO: 4561 - DNA, 442 bp, Gossypium hirsutum
  Clone ID: LIB3493-035-P1-M1-G3
caggaacagcccaatgatgacctcaaaaacatggacgcgtatggctcccattgatgcactgcaaccctaccgagttcaatggacccggtgttggcattcacgaagatcatgttgtcccaaaaggttccgaaattggtactcttggttttggttttgaaggtggtcctgaaaaatgttgttcttctggatgttccggtaattgtaatcctggtggtttcgttctaccatttcctcaaattccagaaatcccaagaattccacagatcccacagatcccacaaatcccacaaattccactaatgccacagatcccacaagtcccacaaatcccactaatgccaggacagtcgggttgtgagagtggggagtgttaccgtcagggttgcggagggacttgtgctgagagtggtcagtccaagttgcgcttaggatttttgccagg

SEQ ID NO: 4562 - DNA, 157 bp, Gossypium hirsutum
  Clone ID: LIB3493-035-P1-M1-G4
ctggtatcgatgatgttgatggcaagaggggtgagatatgcaagaagattgttgaggcttgtgaggattggggtgtcttccaggttgtggatcatggtgttgatacttaactctggtcctaaatgacccgtcgtgcgagagagttttttgcttttcc

SEQ ID NO: 4563 - DNA, 446 bp, Gossypium hirsutum
  unsure (1)..(446): unsure at all n locations; Clone ID: LIB3493-035-P1-M1-G5
ggaacggaaccttctctcagtggcttacaaaaatgtggttggggcaaggagggcgtcttggaggatcatctcttccattgagcagaaggaagagagcagaggaaatgaggatcatgttgcacaactaaaggagtataggggtaagattgaagctgagcttagcaagatctgtgatgggattttgagccttcttgaatctcacctcattcctttggcctcatctgctgagtcgaaggtgttctaccttaagatgaagggtgattatcacaggtatcttgctgagtttaagactggtgctgagaggaaggaagctgccgagagcactttgttggcttacaagtctgctcaggatattgctcttgctgagcttgctcctacttacccaattangctggggcttgctcttaaattctttgttttctactattgaaatccctaactcacct

SEQ ID NO: 4564 - DNA, 52 bp, Gossypium hirsutum
  Clone ID: LIB3493-035-P1-M1-G6
cggacgcgtgggaaaaaaaaaagatggcgtctgtaagggggggtgcaatctt

SEQ ID NO: 4565 - DNA, 172 bp, Gossypium hirsutum
  Clone ID: LIB3493-035-P1-M1-G7
attactttgtgcctcaaggccgaagagccgtggggctggttggcggaaaagagagtgcaatcgctcaaataacaagaaccattgttggcaagacatacaagctctccttctcggtgggcgatgctaacaacttctgtgcaaggtctttggtcgtcgaggcattcccccgtaa

SEQ ID NO: 4566 - DNA, 240 bp, Gossypium hirsutum
  unsure (1)..(240): unsure at all n locations; Clone ID: LIB3493-035-P1-M1-G8
ataaacgaagtgtagaaagagcggaaatggaaggttcgaaaaaaaggttattggtgtcgaanagaanaaaatccgttgtttctatagaattacaggaactggcgttagcttcaccggcggacgttgagttggacaacgctataactgctgcttctgctacttccgacgtagtattcgccggtgaaaagtgttgcagacttagctccgacgagttttctttttctagttgttttagcaatg

SEQ ID NO: 4567 - DNA, 253 bp, Gossypium hirsutum
  unsure (1)..(253): unsure at all n locations; Clone ID: LIB3493-035-P1-M1-G9
acatacacacatacatacatataaacaccaaatatganaaatcccaccttttttgtcttgttttctactaccttctgcttgtttcagtgagcagtgatgttatccatgattcttgtgacaaagctgcgaagggtgatcccaatatcaagtttgacttttgtgtatcaagttttgaagggaaccccaaagctaaaactgctactggggttgcggatttggttaaagtatccattgaaactggtcatggctaatt

SEQ ID NO: 4568 - DNA, 480 bp, Gossypium hirsutum
  Clone ID: LIB3493-035-P1-M1-H1
ttttatcatatcaggtataattcgagctttgccggtgatctgtacctagttttgaagattctgcataaccctttttaagcaatcgtccactaaatgtgtatattatttagcgatatcgataccctttggaattagttgtatatttaccatataggctctttattcgccgatatataatgtcacgggtgcctcttggttgagtgttgttttatgagcaggacatgttttgatgtgagaatatcgagttttccgatcctttataagtgaagcaggttgcttggctcgaattcgaagttgaatatcaccctttttaaaggcaatggcagtgagtttggttgaatttgtttctttgttgaatgatctctcatggtagcattgataatgttcagtgaagaagagcctttttttacttactagtatgatcttttgtgtttgtattcgcttgaaaattggaaaatttatggtgaagaccctaaaata

SEQ ID NO: 4569 - DNA, 476 bp, Gossypium hirsutum
  unsure (1)..(476): unsure at all n locations; Clone ID: LIB3493-035-P1-M1-H10
atttgacccaaaatggcctctgtttgtgcttcttcggctattgcagctgttgccatctcatcccccagttcccagaagactggatcagtagtggggacaacaaaggcttctttcctttcagggaagaaacttagatctgtgagaaagtacacaaaaccagctgccggaccaacatttccagtgtgcgccgccgccgaccccgacagacccctttggttcccaggcagcactcctcctccatggctggatggcagtctccctggtgactntggtttcgatcctctcggtcttggttctgaccctgagacattgagatggaacgtacaagcagagctggtgcactgcagatgggcaatgttgggagctgctggtattttcatcccagagttcttaaccaagattgggattttaaacactccatcgtggtactcagctggaacagaggaatacttcactgacaccacaactctcttcat

SEQ ID NO: 4570 - DNA, 306 bp, Gossypium hirsutum
  Clone ID: LIB3493-035-P1-M1-H11
gaaagcaagccactatggttttaacagaaaatcgaaagggcttcaaaaaaattagcttccatcgccttctttttggcactcaacattctcttcttttccctagtcagtgcttgtggctcttgctcttcacccacccctaaaccaaggccaaacccaaaacccaacacccccacccctactgcatccgcacgaggcaagtgccctagagatgccctcaaattaagtgtatgtgccaatgtgcttaacttagtcaatgtcaccgttggttcacctcccgtgatgccatgctgttcccttctcaatggc

SEQ ID NO: 4571 - DNA, 390 bp, Gossypium hirsutum
  unsure (1)..(390): unsure at all n locations; Clone ID: LIB3493-035-P1-M1-H3
cggacgcgtggggcagcttaagcaaccagttcgcagccatggggaagtattcgaaggagtcagataatcccaccaagtcctgcaaggcaaggggctctgatctcaaggttcatttcaagaacacaagggagactgcgtttgctatcacgaagttggctttgggtaaggctaagacgtatttggaggatgttatggctcacaaacaggccatacccttcagacgcttctgtggtggtgttggacgtacagctcangcaaagaacaggcattctaatggacaaggtcgctggcctgtaaaatctgccaaattcattctagatttgctgaagaatgctgagagcaatgcttaggttaagggtttggatgtggatgcactctatatttctcaca

SEQ ID NO: 4572 - DNA, 472 bp, Gossypium hirsutum
  Clone ID: LIB3493-035-P1-M1-H4
agaagcgatacatgtaccttacagaagagattttgaaagagaatcccaatgtatgtgaatacatggctccttcactggatgctaggcaagatatggtggtagttgaggtgccaaagctaggcaaagaagcagccaccaaggccattaaggaatggggccagcccaagtccaagatcacccaccttgtcttttgcaccactagtggtgtggacatgcctggggctgactaccagctcaccaagcttttgggcctccgcccgtccgttaagcgcctcatgatgtaccaacaaggttgcttcgcaggggggacggtgctccgagtggctaaggacttagctgagaacaacaaaggtgctcgtgtacttgttgtgtgctcggagattaccgctgttaccttccgtggacctagtgacactcacctagacagtcttgtgggccaagcattgtttggtgatggtgccgcagctgttat

SEQ ID NO: 4573 - DNA, 331 bp, Gossypium hirsutum
  unsure (1)..(331): unsure at all n locations; Clone ID: LIB3493-035-P1-M1-H5
gagacaatgagaggaacattgacgttgacttggattgtgatggtctgcctctcccaagtagcggtgcaaagccaatactactcggagagcttaccatatgatcccaggccggttaaagtcactaatctttacttctttttgcatgaaactcttccccgtaagaacccaacagtagtcattgtagcccaagctaacaacacaagcaacgacaactactcatcagtgccatttggcaccctatatgccattgatgatcccctcaagataggtcctggggacaactcanaggtgattgggaatgctctgggacttgggatcttgtccggcaaaa

SEQ ID NO: 4574 - DNA, 406 bp, Gossypium hirsutum
  Clone ID: LIB3493-035-P1-M1-H6
aaatgataagggaagattgagcaaggaagagattgaaagaatggtacaagaagcagagaggtataaagcagaggatgaggaagtgaagaagaaggtggaagctaagaatgggcttgagaattatgcttacaatatgaggaacaccgtgaaagatgacaagtttgctgggaaactcgacccagcagagaagcagaagattgagaaagccattgatgatacaattgaatggcttgatgggaaccagctggctgaagttgatgaatttgaggacaagttgaaggaattggaaggtatttgcaatcccatcattgcaaagatgtatcaaggtggtgctggaggtgatgtgccaatgggtggtggtgctgagatgcctaacggtggtgggtctggtgggtctggtgcaggg

SEQ ID NO: 4575 - DNA, 327 bp, Gossypium hirsutum
  Clone ID: LIB3493-035-P1-M1-H7
cggacgcgtgggctttgtgataaatatgctctatctcagaaacttgtgcgattcatgcctgtattggagttggggaaatctaaagttggattatcacaaacattttgtttgtttccatgatttagtaggtcttaaaatgttgggaaattaggcactgcaggccgaactttgtaataatataaaaaaagaaagaaatattcgagtattgtgtgtaaatagtattgatagggttttttaagttatgatacccatttatgaaagatttttattgtaatttattccccctttttaaggttttttttatataaattatgtagctatttttaa

SEQ ID NO: 4576 - DNA, 385 bp, Gossypium hirsutum
  Clone ID: LIB3493-035-P1-M1-H8
gatttacttacggtttcaaggacatcttccctgttgctggtggaagaggaggagcctggggatatgatttttgctttcaagatgaagataaagttcttcctttgatccttggaaccaacttacaacaaccagggagtcattccaattgggaattattggctaatttaatcatgccacaaccaccttccaagggaatattggaatcttacttttctttggcttgaacctgtacttgggaccaagctcttcctggttctggagattggtttcaagcttcaattgaacccccaacagcttacacggggaccaacggtggtggtggacgaaaacgccgtcgcaccaggagcagtaagaacaaagaagagcttgagaaccagagaatgac

SEQ ID NO: 4577 - DNA, 364 bp, Gossypium hirsutum
  Clone ID: LIB3493-035-P1-M1-H9
gttttgtttctctttagtttacgtttttttgtgcttttggattttttgatactaaaaaagggaagcaaagaagaagggaaatggagggcaaagaagaggatgttagattgggagccaacaagttcacagagaggcaaccaattgggaccgcggctcagactcaagatgacgggaaagactattctgaaccaccaccgtctccatttttcgagcctggcgagttaacctcatggtccttttatagggctgggattgccgagtttgaggcgactttccttttcttgtatatcactattttgactgttatgggagttgataaggaaaaaactaagtgcccaactgttgggattcaagggattgcttg

SEQ ID NO: 4578 - DNA, 460 bp, Gossypium hirsutum
  unsure (1)..(460): unsure at all n locations; Clone ID: LIB3493-036-P1-M1-A1
ctttcaggaattttctctctctagaactcgcctttctgtgtttgtttccctagaaaaaaaaaaccccaaaatttcccccaattcaagatttgtgttttcttcttcaaattgaatccgaatcttttataaaatttctcttttgggttttcaagtgatgtctttattgccaaagagcgattcaattcatatccgtgaggtatgggatgataacgttgaggaagaatttgctttgattcgtgaaatagttgatgattatccttatgttgccatggatactgaattcccaggcattgtattacgtcccgtaggttatttcaaaagcagttatgattatcactatcaaactntgaaagacaatgttgatatgttaaaacttgttcaataagtcttactttctcagatgagaaaagaaacttacctacatgtggaactgataaatactgcatttggcaattcaatt

SEQ ID NO: 4579 - DNA, 271 bp, Gossypium hirsutum
  Clone ID: LIB3493-036-P1-M1-A10
atgcgattaggaaagcgtatcgtttaacggatgcaaatatattggaacaagccattgatttgggcaaagggggttcaacggcagtgacagcaatattgatcaactgccagaagctggtaatagcaaatgttggcgattcccgggctgtgatttctaagaacggcgtggctaagcagctttcagttgatcatgagcccgcttctgaaagggagagcattgaaaatagaggcggttttgtttcgaactttccaggggatgtcgcgcgtgttga

SEQ ID NO: 4580 - DNA, 392 bp, Gossypium hirsutum
  Clone ID: LIB3493-036-P1-M1-A11
cgcacagcgaaattcattcttcgatcttcgagacgccggcggcgaaacaccgctttgtttaccggtgacgtcgttttcttcagatatctgaaagatgtccggtcaatcccagcgcttgaatgtggttccaactgttacaatgcttggaatcatgaaagctaggcttgtgggtgctacaagaggtcatgcacttctcaagaaaaagagtgatgcccttactgtacaatttcgtcagattcttaagaagatagtatctacaaaagaatcaatgggagagattatgaaaacctcttcattttccctaactgaggccaagtatgttgctggtgagaacatcaagcatgttgtccttgagaatgttcaaaatgcttcttttaaagttcgatcccgac

SEQ ID NO: 4581 - DNA, 390 bp, Gossypium hirsutum
  Clone ID: LIB3493-036-P1-M1-A12
cggacgcgtgggcttgcacgccttatgtccgggacatgcgtggctttacacagagatgcttgctgctgaaactattgtttatcaacaagggaatctgacaagttcttgggatattctcctgaacagcatcctattgtccttcaaattggtgggagtaaattagaaaacttggcaaaagccactgaacttgctaatgcatacaactatgatgagattaatttcaattgtgggtgtcctagcccaaaagttgcagggcatgggtgctttggtgtgcgtcttatgcttgatccaaagtttgttggagaagccatgtcagtcattgctggcaatacaaatgttcctgtcagtggtaaatgtcggattggtggtggtgatcatgattcatttaat

SEQ ID NO: 4582 - DNA, 413 bp, Gossypium hirsutum
  unsure (1)..(413): unsure at all n locations; Clone ID: LIB3493-036-P1-M1-A2
atacatcttccctggcctcggtctgggtttaattatgtgtggtgcaattcgtgttcatgatgatatgcttctggcagcctcggaggctttggctgcacaggtgacacaggagaactttgacaagggactcatttacccaccatttagaaatatcagaaagatttcagcccatattgcagccagtgttgcagctaaagcatatgaactgggtttggctactcggcagcctcagcccaaggatcttgtgaagtatgctgagcactgcatgtacaatcctgcctaccaaagctaccggtgaaggtagttagaacgcctctacttttatcatattatttattaaaaaaaggaagcccagtttaaccattccttgaagtcttgtatttggtcttttttggttgatatctttgncattc

SEQ ID NO: 4583 - DNA, 417 bp, Gossypium hirsutum
  unsure (1)..(417): unsure at all n locations; Clone ID: LIB3493-036-P1-M1-A3
gctccctaagctaaaatatggggatgcataggtgacggtatctaattgtgtggtttttgaatttaagagcattgctcacttcactaggctgccctgaatgttaccgccacccatctccgccgccgaaatgtcctccgccagactatccgcctaaacatcatcatcctcccattgtaaagccaccctatcaccctaaaccaccaaaacatcatcctccaaagccacctaagcctccggtggtaaacccaccatatcaccctaaaccaccgaagccaccggtggtgaagccaccgtatcaccctaaaccacctaagcctncggtggtgaaacccccatatcaccctaaaccaccaaaacatccaccgcagcatcccaagccacctgttgtgaagcctccatatatacccaagccaccta

SEQ ID NO: 4584 - DNA, 395 bp, Gossypium hirsutum
  Clone ID: LIB3493-036-P1-M1-A4
ggtaacttcaacaagaatttccaatcgtctgggaggcagctgagaagttaactcccgagatgacgagatcaccaagcaaagctgccagcatgttttccgggacagtcgaaaaatgtgctacttgtggcaaaactgcatatccacttgagaaggtaactgtagaaggacagtcttaccacaaatcatgtttcaagtgctctcatggtggctgctctttgagtccatcaaattatgcagcacttgaaggcattttgtactgcaaacatcacttttcccagctcttcaaggagaaaggaagctacaatcatcttatcaaatccgcatcaatcaagcgtgccgctgcatccgttcctgaagcttgaatacctatttcatgttcttcgtctattcccatg

SEQ ID NO: 4585 - DNA, 407 bp, Gossypium hirsutum
  Clone ID: LIB3493-036-P1-M1-A5
gaagagatataattgaaagaaaagaaaaatggttctgctagagaaactttgggatgatgtagtggccggacctcaaccggaacgtggccttggccggctgaggaagatcacaaccaccccacccttgtccaccaaagatgaggcttcatcaatggcgatgccgacgagtccgacgacacctgggacaccgtcgacgccggtgtcggctcgtagggacaacgtgtggaggagcgtgttcaatccaggtagcaaccttgcaaccaaaggtattggcgctgaagttttcgacaagcctcaacctaactctcctactgtttatgactggctttacagcggggagacccggagcaagcatcaccgctgattgggcgatggctgacggcggcggagggtagcaaaaccactag

SEQ ID NO: 4586 - DNA, 143 bp, Gossypium hirsutum
  unsure (1)..(143): unsure at all n locations; Clone ID: LIB3493-036-P1-M1-A6
accttctacaaggcccaaggacatgcanntggagctggacttgaggaagaagacaaactngatctaacaacatcactccttgagaaggccaaggcaaaaggagtctctctcttgctcccctctgatgtggttgnngctgacaa

SEQ ID NO: 4587 - DNA, 442 bp, Gossypium hirsutum
  Clone ID: LIB3493-036-P1-M1-A7
cggacgcgtgggcgatcaacggtgaaaggttcgttttttttcatggcgatgatgacctgccgttccttgttgcttttacttttgatctcactttttgtttcttttggtttcgccgagatccgtttgacggagatccgatccgatgtccgacccataatacctttcgatgagttcgggttcactcacaacggccgccttgaactcaacctctctcagatcgatctctccgacaagaacaagaacctcgacttgaacaaaatcggattcttcctctgcacgcgcgacacgtggttccacgtgcttgaacaactcaacgaccaccatgtcacgtgtgctctcgattccgaactcgtcaaggtcgtcttcaggttcaaatctctcgacgggaaaacgagcatcaaccccgttttccctgtaaacaacgctgaccagtacaccctac

SEQ ID NO: 4588 - DNA, 100 bp, Gossypium hirsutum
  Clone ID: LIB3493-036-P1-M1-A8
aaagactagaggtctttgatggtgtgggcgggaagcttaacgcctattcaattcatgtatcaacttatattaaatttatggcaataataagttcctttgc

SEQ ID NO: 4589 - DNA, 465 bp, Gossypium hirsutum
  Clone ID: LIB3493-036-P1-M1-A9
cacatttggagctgttaaagcgaactaatgtgctcaatgatgctttccctatctggcatgatggagaatttggaactataaacaattttcgtcttggacgactgcctaaaattccagttgagtgggacgaaataaatgctgcctggggtcaagcttgcctcctacttcatacaatgtgccaatatttccgaccaaaatttcactatcggataaagataattcccctgggtagctaccctcggataatggacagcaaccacaatacatatgagttgtttggtccagtgaacctgttctggagtacacggtacgacaaagcaatgacactattcttaacttgcctcaaggactttgctgagtttgcaaatgccaaggatctagaaaacaacattccacctgagaaatgctttaacttaccctacaggatcgagaacgataaagttgaaaactactccatcacacaaa

SEQ ID NO: 4590 - DNA, 456 bp, Gossypium hirsutum
  Clone ID: LIB3493-036-P1-M1-B1
ctttattatttatgacaacaatacaccaacacgtagcttttgcttcttcgaattctcctccatctcacggtaacaagatctcccttcccctctctttctctccggcggcgatctcaaatcaccggtaaatcgcaccgtaacgcccgattactcgtcacctctgtgatctccgctgacacctcgtggtttcagtttattctaactcgtcgccatcatgaatcccgaatatgattatctgtttaagcttttgcttattggtgattctggtgttgggaaatcatgtctacttttgaggtttgctgatgattcatatctggatagctacatcagtaccattggtgttgactttaaaatccgtactgtggaacaggatggaaaaaccatcaaactccaaatttgggacactgctggccaagaacgctttaggacaatcactagtagctattattcgggggc

SEQ ID NO: 4591 - DNA, 405 bp, Gossypium hirsutum
  Clone ID: LIB3493-036-P1-M1-B10
gcggcagccgacaatgtgggttcgaatcagggccagaacattcgcaaaggtcttcgaggtgactcagttgttctcatgggtaaaaatacaatgatgaaaaggtccgtccgtatgcacgctgagaaaaccggaaaccaggctttccttaaccttatccccttgcttcagggaaatgttggtttgatttttaccaagggtgatttgaaggaagtcagtgaggaagttgccaagtacaaggttggagctcctgctcgtgttggtctggttgcacccattgatgtggttgtcccacctggcaacactgggcttgacccttcacaaacttctttcttccaggtgcttaatattccaaccaagattaacaagggtactgttgaaattatcactcctgtggagcttatcaag

SEQ ID NO: 4592 - DNA, 483 bp, Gossypium hirsutum
  Clone ID: LIB3493-036-P1-M1-B11
gttcatataatagatctcaatgcagctgaacctgcgcagtgggttgcacttattcaagctttgagtgcaaggcctgaagggccgcctcatttgaggattactggcattcatcaacagaaagaagtgttggatcaaatggctcatagattgattgaagaagctgaaaaattggacatcccctttcagttcaatccggttgtttgcaaattagagaatctcgatgttgataaattgcgtgttaaaactggggaggcactggcaatcagttctgttctccaactgcattcatttttgacttctgatgatgaacttcttcggaagaaatcgccattgggatcgaagaatttgaatggaattcacttgcaaagagccctgcagatgaaccagagcactttaggcgagttgcttgaaaaagatatggttaatggatacagccctagcccggattcggcctcatcatcaccgctattttcaactggatca

SEQ ID NO: 4593 - DNA, 457 bp, Gossypium hirsutum
  Clone ID: LIB3493-036-P1-M1-B12
aatactgcagaatgggcaaggaaaagactcaggattaacattgtcggaattggccatgtcgactctggaaagtcaaccaccactggccacttgatctacaagcttggaggtattgacaagcgtgtcattgaaaggtttgagaaggaagctgctgagatgaacaagaggtcattcaagtatgcttgggtgcttgacaagttgaaggctgagcgtgaacgtggtattaccattgatattgccttgtggaagtttgagaccaccaaatattactgcactgtcatcgatgcccctggacatcgtgactttatcaagaacatgattactggtacctcccaggccgattgtgctgtacttatcattgactctaccactggaggttttgaggcaggtatttccaaggatggacagacccgggagcatgctctgcttgctttcactctcggtgtcaagcaaatga

SEQ ID NO: 4594 - DNA, 391 bp, Gossypium hirsutum
  Clone ID: LIB3493-036-P1-M1-B2
cactctgttaccaatgacaacctcattatcaacgtctgtaacagcttaaacgagcctttcctcctttcctggaatggagtccaaaacaggaggaattcatatgaagatggtgtatacggaacaacatgccctatccctccaggaaagaacttcacatacattctgcaggtgaaggatcaaataggaagcttctattacttcccctctcttgggttccataaggctgctggtggttttggagggattagaatccttagccgaccacggatcccggttcccttcccagatcctgctggagattacactgttcttattggagattggtataaggccaatcacacggatttgagagctcaactggatagtggtaggaagctacctttccctgatg

SEQ ID NO: 4595 - DNA, 472 bp, Gossypium hirsutum
  unsure (1)..(472): unsure at all n locations; Clone ID: LIB3493-036-P1-M1-B3
tataaacatgtattttaatatactaaattacacataagtattaatgttgtatctgtttattgtaacctataattgaataatagctatatatattaatacttataaaatatattatttcattgtataatattgtatcacatacaaacagagtagtacataatatattagtaatttatatatattaataattaaacgttataatatcatgtaatatnaattttatgttattctataatataatagtaacacattatatatattaattattatcatatattattggttagatattaaactggttgaaatatgctntaattccttatatttttcatatatttgaaagttagctctcctattatattatataatgatatatcatatcatatagtttataaaatattaataagttatgtatgtgcatcaatgattaaacattataatataatggaataatatatcttttattataata

SEQ ID NO: 4596 - DNA, 399 bp, Gossypium hirsutum
  Clone ID: LIB3493-036-P1-M1-B4
ctggagaccccattccgactaacaaaagatggagacggtgacaagatctttagccaccctgacgtggttgcagaggagccatggtacggcattgagcaagagtacacactttttcaaaaggacactaaatggcctcttggatggcctgtcggagggtttcccgcaccacagggaccgtactattgtggagtgggttctgacaaagccttcggccgagacattgtggatgcacattacaaagcttgcctttttgctggcattaacattagtggaatcaatggcgaagttatgcctggccagtgggaattccaagcaggtccagttactgggatttcttcgggggatcaagtatggatggctcgatacatactcgagcgaataactgaaatcgcaggagct

SEQ ID NO: 4597 - DNA, 310 bp, Gossypium hirsutum
  unsure (1)..(310): unsure at all n locations; Clone ID: LIB3493-036-P1-M1-B5
cggacgcgtggggttttaccataggtcaatgtggatgtcatgaatccctgggtagggagctgctgancgaaagcaagctgaaggatcttctgcatggatcagaatatgttctcacttatgaggataaagatggtgattggatgcttgtgggtgatgtcccatgggagatgtttactgatacctgcaaaaggctgaggatcatgaaaagctctgatgctattggactcgcttcaagggccggggaaaaatgcctgatccggaactagcctagtttgatacttgatttttgctttccgatgcaattcttttc

SEQ ID NO: 4598 - DNA, 203 bp, Gossypium hirsutum
  unsure (1)..(203): unsure at all n locations; Clone ID: LIB3493-036-P1-M1-B6
cccacgcgtncgccgtaagttgccgccggctgaaggtgagaaaaaccccagtaccaatgaggagcgtgaagatcgtanaacgcttggtcttgttcttcttcggggtgaaaaagggatttctatgactggggagggtgcttctcctcctgaagagtcgcggtcaaagtctgccgctgctaatgctggtcctggacctgggattg

SEQ ID NO: 4599 - DNA, 212 bp, Gossypium hirsutum
  Clone ID: LIB3493-036-P1-M1-B7
gtttcatacacagtggagcagcttggaggcgggagatccttacaatgccgacatcttacctgatctcgagaactacgttaatgaacaggtttcatcgcaaacctatagcctggatgctaatctctgccttcttcgcctctaccagttcgagcctgagcgtttgagcacacaaattgttgcacgcattttggttaaggctctcatggcaatgc

SEQ ID NO: 4600 - DNA, 342 bp, Gossypium hirsutum
  unsure (1)..(342): unsure at all n locations; Clone ID: LIB3493-036-P1-M1-B8
ggggatttggtggcttgggtggcggcggtatggctggtggtggagttggaggtnnanntcaangtgactttgacctatgaactattggtggtgttgacaactgtctaaaatctcagtggagggggacgaaataaatgctgcctggggtcaagcttgactactacttcatacaatgtgccaatattgccgaccaaaatttcactataggataaagataattgccctgagtagctacccttggataatggacagcaaccacaatacatatgagttgtttggtccagggaacctgtcgtgaattacacaggtacgacaaagcaatgacacttttcttaacttgcc

SEQ ID NO: 4601 - DNA, 392 bp, Gossypium hirsutum
  unsure (1)..(392): unsure at all n locations; Clone ID: LIB3493-036-P1-M1-B9
cgtcggtccatccgacaaaaaaaagggggaggccgatcaaagattgtggcgaagcnaatngctcaaaccatctcctacattaccgggtctcaactccttccccttaaacgccttccgaatatcggcatcatagatgttagggatgatgaaaggaggtatgatgggcatatagctgggtctttgcactatgccagtggcactttcactgataagatctccaatcttatccaagatgtcaaaggcaaagatactcttggttttcattgggctctaagccaggttcggggcccaacttgggcacggagggtagcgtatcatctagaggaggtgaaggaagatactgggatcaagaacattttggtgtttgaggcgcggttaaatggcggggaagg

SEQ ID NO: 4602 - DNA, 445 bp, Gossypium hirsutum
  Clone ID: LIB3493-036-P1-M1-C1
gtcagggaccctgacaaccagaagaagatctgtcacgttgtaacactacaagagttgggagacttgaagatctttcaggcggatttaactgatgaagggagctttgatgcccctattgctggttgtgaccttgtcttccatgttgcgacacccgttaactgtgcttctgaagatccagagaatgacatgatcaaaccagcgactcaaggagtggtgaacgttttgaaagcttgtgccaaagcaaaaacagttaaacgagtcgtcttgacatcatctgccgcagctgtgtctatcaacacactggatgggacagatctcgtcatgacagagaaagactggaccgatatcgagttcttatcatcagcaaagccaccaacttgggggtaccctgcatccaagacgttggctgaaaaggcaggttggaaatttgctgaagaaaacaaca

SEQ ID NO: 4603 - DNA, 342 bp, Gossypium hirsutum
  Clone ID: LIB3493-036-P1-M1-C10
attgcaatggccacaaacagtcgtagaacatatggtcttctattcgactggctataccctgcgcacatgccacttatcttgaaaggcattactcactggactgacacaccagaggttaccactccgttgttaaaattcatggctgagtttgtcttgaacaaagcacaacgcttgacatttgactcatcttctcctaatgggattcttcttttccgtgaagtcagtaaactaattgtggcatatgggacaaggattttatctcttcctaatcctgctgatatatatgccttcaagtacaagggaatatggatttcactaactattctggcaagaggtcttgct

SEQ ID NO: 4604 - DNA, 260 bp, Gossypium hirsutum
  Clone ID: LIB3493-036-P1-M1-C11
attcatgactatgagatggagctgggcaagggttatatgaaaaactggggtctgttgcaaatattcggatctatggtccaaaaccttctgatgacgttcaccgtgctgctctctggtctttcaatatcgagaatattcatcctacagatattgcaacttttctagaccaacagcatggagtgggtatcagatcagggcatcattgggctcagcctcttcatcaccatctaggggtcaatgcaagcgcacgtgcgagcctt

SEQ ID NO: 4605 - DNA, 148 bp, Gossypium hirsutum
  unsure (1)..(148): unsure at all n locations; Clone ID: LIB3493-036-P1-M1-C12
gaaaaaagaagaggaagagaggaaanaatgtatcgtatgctggcgtatggattcagcctattttattttttttccactgttcttgtagatcttcttgaattatatccattctgggttgggagtggggctacatttttcaaatttattg

SEQ ID NO: 4606 - DNA, 262 bp, Gossypium hirsutum
  Clone ID: LIB3493-036-P1-M1-C2
aaaatggtgaaaagttgatgcactgatcattaccgatgatactctggcaatcgcagtttcatatttactagcctacattattatctgtggtctgatcggacatattattacatgtctgagctagcttttcattgatggggaacacaataaagatgtggtcgaactagtaactagataagagtgttaatatatacatgaaaaaagtttcggattcgtatctgaaatgaaagaacatttgggtctggagaggagagagggacgg

SEQ ID NO: 4607 - DNA, 384 bp, Gossypium hirsutum
  Clone ID: LIB3493-036-P1-M1-C3
cgcctactcacccaccaacccaccaacatgaggaccggcctcacccttaccctgagccccattctcattcacccactaaacccccaaaccccaactcctcttcatttattcaacaaccaaggcgccagggcaacccccaaccaagccaccaattcacccaccacccaaaccaccagttcaacctccaactaaaccaccaaccaaaccttcaacttaacccccgactaaaccaccaactcagacccccactaaaccaccaaccaagccttccacttaacccccgacgaagccaccaacacacccaccatcttatacttcggccaagccacctaaatcgagccaagtggcagtgcaaggcgttgtttattgcaagtcatgcaagta

SEQ ID NO: 4608 - DNA, 268 bp, Gossypium hirsutum
  Clone ID: LIB3493-036-P1-M1-C4
gtttccaagtcttccaaggtcttgcatacatgcacgagcgtggatattttcatcgcgacctaaagcctgagaatttgttggttactaaagatataatcaaaattgctgattttggtcttgcacgtgaaataaattcaagtccaccatacactgagtatgtctcaacacgctggtatcgggcccctgaagtactccttcaatcatacctgtatacttcaatagttgatatgtgggcgatgggggcaatcatggctgaattattcacctt

SEQ ID NO: 4609 - DNA, 211 bp, Gossypium hirsutum
  Clone ID: LIB3493-036-P1-M1-C5
ggaaagccttatggcttctttggagaagagtggtcggagatttctcctggcagggtgtatgctattgcttgtgttcttgaaaatgttcctttcatcaatggcagcccacaaaacacctttggtccagggttgattgatttggctattcaaaggaactgtctgattggatgagatgacttcaagagtggccagacgaatcagagagtttgtc

SEQ ID NO: 4610 - DNA, 429 bp, Gossypium hirsutum
  Clone ID: LIB3493-036-P1-M1-C6
cacaaattttgctgtcgtgacatggtcaaacgtgggagggtcgagtaatgctggaatctgagtgccagtttaagaagatccggaagcctccttactttaaccggtggataaacttaaaagttccgttccgtgaggtttttggtggtgggaggtgcaatctgaaggaggcagtcgagatggcaggcctggtgtggcagggacgtgcacattgtggtcttgatgatgccaaaaacacagctcgcttgcttgccctcttgatgcgccagggttttaagttcgctatcacaaacttactgatgtgggaagctagcgatggttcattgacatggaacccgatgcctgagaacacgggtttgtttcttcatcacccccacaagcctaatgatcagcaaagggcccttttccagggccacccatattgtttcatgg

SEQ ID NO: 4611 - DNA, 210 bp, Gossypium hirsutum
  Clone ID: LIB3493-036-P1-M1-C7
gattctcacccacaacagcaagggaagcaaagtccaaattctttggagacggagaatttcttgctgagggaactgcaattcaagatctttttaatcctgatcgtgttcttatcggaggccgggaaaccccagaaggcaataaggctgtccaagcattgaaggagggttatgctcattccgtttctgaggagagaatcattaccaccaatc

SEQ ID NO: 4612 - DNA, 217 bp, Gossypium hirsutum
  unsure (1)..(217): unsure at all n locations; Clone ID: LIB3493-036-P1-M1-C8
caggaacaaccactttggattgtgtgtgagaagtnacatggttattaaggtgaagcanganttgctggtcaacagctttaagaccattgatggtcgtggggtgaatgtncatattgctgatggggcatgtatcacaattcaatacgttaccaatgtcattgttcatgggctgcatattcatgactggaagcccactggcaatggcatggttagaagg

SEQ ID NO: 4613 - DNA, 449 bp, Gossypium hirsutum
  Clone ID: LIB3493-036-P1-M1-C9
gcggggaacacttttaataccgtgtcgaacgggaatgagaggtagctttcccctaaatggcacatatttccaagttaatgaggtatttgccgaccatgattctagtctgaacccgattgccgttccaagggaatggctatggaacctgccaaggagaatggtctactttgggacatccataccttcaatatttaaaggcttaacaacagagggaattcaacactgcttctggagaggatatgtttgtgtgcggggatttgaccagaaatctcgagcaccccgtcctctaatggctagattacatttcccagtcagcagattggccaaagcaaaaggcaagggtgctggagaagacgagtaaatgatagcagagtcataagatccaaacaagtcaacattgaccaaataaccatgtatgaagaaatggaattgcattttacaccactgac

SEQ ID NO: 4614 - DNA, 465 bp, Gossypium hirsutum
  Clone ID: LIB3493-036-P1-M1-D1
gtggttttgaagctggtatctctaaagatggtcagactcgtgagcatgctttgcttgcttttaccctcggtgttaggcagatgatttgctgctgcaacaagatggatgcaacaaccccaaagtactcaaaggcaaggtttgatgaaattgtcaaggaagtctcttcttatcttaagaaagttggttacaaccctgagaagatcccatttgtcccaatctccggttttgagggtgacaacatgatcgagagatctacaaacctcgattggtacaagggtcctactctccttgaggctcttgaccagatcaccgagcccaagaggccctcggataagccactccgtcttccacttcaggatgtctacaagattggtggtattggaactgtccctgttggtcgtgttgaaactggtgtcctcaaacccggtatggttgttacttttggtcctactggtctgaccactg

SEQ ID NO: 4615 - DNA, 444 bp, Gossypium hirsutum
  Clone ID: LIB3493-036-P1-M1-D10
cttgttttgatcaaagaaaatttagggtgaggaaaaatgccgatgaatagaattgcggttgggacagcgggagaggccagccatccgactgtgataaaagcggctttggctgaattcttttacatgcttatttttgtatttgccggagaagggtccgggatggcttataacaagctaacgaataatgggtcaagcacaccagcggggctggtagctgcatcattgtcacatgcctttgccttgtttgtggcggtttcggttggtgcaagcatttcaggtggtcatgttaaccctgctgtcacctttggggcattcatcggtggccacattactttgttacgaagcttttggtactggattgcgcaattgctaggctccgttgtcgcttgcttgcttctcaaggttgccaccggtggaatggaaacattagctttcgcgctattc

SEQ ID NO: 4616 - DNA, 182 bp, Gossypium hirsutum
  Clone ID: LIB3493-036-P1-M1-D11
cggacgcgtggggtaccctgaagtggcgggggtcatgcctccacgtaactgtgaatccctctcgtcaaatgatgattggatggccggaaaaatagtgctttgctttgcttcagactacaatcagagcttgttaaatgatgctatattgtctgtcaaagcggcgggtgggttgggagtgattg

SEQ ID NO: 4617 - DNA, 97 bp, Gossypium hirsutum
  Clone ID: LIB3493-036-P1-M1-D12
cttgtaataagaaaatcatttttgctgtaacagatgatcgaaaaggataagtatttgtttattgatttttttactaatttttggtgggtaaaattgg

SEQ ID NO: 4618 - DNA, 443 bp, Gossypium hirsutum
  Clone ID: LIB3493-036-P1-M1-D2
cgggtggatacaagggttcccattgaagtcacgatgggagaactgaagaaactagttgaagaaggtaaagtgaagtacataggtttatccgaggcttctgcatcgaccattaggagggctcatgcggttcatccaataactgctgtgcaattggagtggtcattgtggtctagagatgttgaggctgacataattcctacttgcagggaacttgggattgggattgttgcttacagtcctctggggagagggttcttttcatctggccccaaaatgatggaaactttgtccgaaggtgactttagaaagtatctcccaaggttccagccagaaaatatggagcataacaaacgcctgtacgagcgagttaatgagatagcagtgaagaagggatgcaccccatcacagcttgcatttggcctgggtccatcaccaagggaacg

SEQ ID NO: 4619 - DNA, 301 bp, Gossypium hirsutum
  unsure (1)..(301): unsure at all n locations; Clone ID: LIB3493-036-P1-M1-D3
cggacgcgtgggctgggaagcaacttgaagagggnaggacccttgcagattacagcatccacaatgagtccaccctccacttggttctccgtctccgaggcaggatgcaaattttcgtgaagaccctgactggaaagaccatcaccctggaagttgagagctcatacacgattgataatgttaacgccaagatccacgataaggaaggaatcccaccagaccagcagaggctgattattggtgggaagcaacttgaagatgggaggacccttgcagattacaacatccataatgaatccac

SEQ ID NO: 4620 - DNA, 371 bp, Gossypium hirsutum
  unsure (1)..(371): unsure at all n locations; Clone ID: LIB3493-036-P1-M1-D4
caggaaacagcagaaggtgactgtaacggaagatggtgaagctaacaaagtgtggaagaaagctaagtcaacagggaaaaaggctgagatttggccttatgttccttacaatctggtggctcaaccttacgctgttactgcttatgacaagaaggcacctcctggttatgttaggaaagtagacaacaatgtaagcagcactgctaccgtcactagatatgaagatccttacatcaccatgttcagggatgaaaacccaaatgcatgttctgtcatgtgaagctgcaattntatattactatttctttttggttttctctggtggatttcctgggagatattatgacaagattggcgagttattactaatc

SEQ ID NO: 4621 - DNA, 370 bp, Gossypium hirsutum
  Clone ID: LIB3493-036-P1-M1-D5
ctagtccgactttgtgaaatgacttgagaggtgtaggataagtgggagctctcgggcgaaattgaaataccactacttttaacgttattttacttattccgtgaatcggaggcggggcacggcccctctttttggacccaaggccggcttcggccggccgatccgggcggaagacattgtcaggtggggagtttggctggggcggcacatctgttaaaagataacgcaagtgtcctaagatgagctcaacgagaacagaaatctcgtgtggaacaaaagggtaaaagctcggttgattctgatttccaggacgaataccaaccgtgaaagcgtgggctatcgatcctttagaccttcggaatttgaagct

SEQ ID NO: 4622 - DNA, 213 bp, Gossypium hirsutum
  unsure (1)..(213): unsure at all n locations; Clone ID: LIB3493-036-P1-M1-D6
gttggatccgaactgatgtttcagtctctgggtcgggtgatttgggtgtcgtggtgcttantctncattgttnaantcccatancaacaatgtgagcagcaacagtattgtgtcacctgcgggtcagtgaagcaccaccagtgtacatgaacctttggaatgtcctgtttgtaccaattctatgtaccctcccatccattagtgtgacaatgg

SEQ ID NO: 4623 - DNA, 239 bp, Gossypium hirsutum
  unsure (1)..(239): unsure at all n locations; Clone ID: LIB3493-036-P1-M1-D7
acgcgcctttcagtccaacaagttatgnccggcnccgtcgaagccggtggtttccccgtcgaccaccgtaatgggatctacttaatccttacctcccacgacgttaccgttgaagatttttgccgtgccgtttgtggcttccattacttcacgttcccatccatggtgggtcacactttgccctacgcttggatcggcaactcgggtaaacaatggccgaggtctgcgcttaccccttc

SEQ ID NO: 4624 - DNA, 423 bp, Gossypium hirsutum
  unsure (1)..(423): unsure at all n locations; Clone ID: LIB3493-036-P1-M1-D8
catctttgaaatacaagaaccctaaataatgtgaagccatgaatcccacactggccacgttatcatcaccatccctctcttttcttcccttgaaatcactttcttccccttcattcctcacttttccttttcccaaacccctcaggcttagggcttcttctgcaaattttgatgccattcccgtttctaaacctaacaacaatggccaatccctctcccaaaagcttcaatcatttgccaaaaccgctgttttggtcggtgccacaagtttgatgatcgggaaattctccaacttccctgccaaagccgattctctaccggcaacgactgaacaagaacctgcagttctccaagaaaacgaacaactgaaaacccaaagcccaaaagaaacttcnaccgtttctgaagttctgggatctaatg

SEQ ID NO: 4625 - DNA, 289 bp, Gossypium hirsutum
  Clone ID: LIB3493-036-P1-M1-D9
gcagaaaatatctcaaatctcctcctgtccggagaaatcttaggatcatcaccatggcctcaaatcccaaggtcttctttgacatgactatcggtggtcagcccgctggtcggattgtgatggagcttttcgcagattgcactcctcgcactgctgagaacttccgtgccctctgtaccggcgagaaaggcgtcggccgcagcggtaagcccctccactacaaaagcttctctttccatcgtgtgatccctaactttatgtgccaaggaggtgacttcacgggcggaaa

SEQ ID NO: 4626 - DNA, 117 bp, Gossypium hirsutum
  Clone ID: LIB3493-036-P1-M1-E1
ttctggtgaatgggacatccttttatttacgtttgaagttttgggtttttaaatgtaataaggccgcttaattatttttgatggttttaatatgtattactaaaataggtattactt

SEQ ID NO: 4627 - DNA, 174 bp, Gossypium hirsutum
  unsure (1)..(174): unsure at all n locations; Clone ID: LIB3493-036-P1-M1-E10
gcttataatgcaatttggtgttggcggagaggggattgatatggatgggggtacaaancatnnnataaaanttgccaaaattcctggtgatgctactggaaatgctggatcttgtggtgaaatggctatatatctaacgttgggccttcttgggaaacagaaagaaatgcaaat

SEQ ID NO: 4628 - DNA, 148 bp, Gossypium hirsutum
  unsure (1)..(148): unsure at all n locations; Clone ID: LIB3493-036-P1-M1-E11
cgaaaattgaaattctcccgaaaatgaatgggtaaaaataaaaataaaaaatagttttttttgaatttttttctttttctggatttcttttcctttctctgttggagatgaatggagaagggaaagaaagtnaggtagttttaatgga

SEQ ID NO: 4629 - DNA, 155 bp, Gossypium hirsutum
  Clone ID: LIB3493-036-P1-M1-E12
ggaggtacaaaatgcgtctcaaacggcttaagtagcagcataagggcaaggaggggattgatatcgcgaaacagcgccagtcccaagagcaggcgaggagaaagaagatgtcgagggcacaggatggaatattgaagtacatgttgaagatgatg

SEQ ID NO: 4630 - DNA, 418 bp, Gossypium hirsutum
  unsure (1)..(418): unsure at all n locations; Clone ID: LIB3493-036-P1-M1-E2
gtggagaggtaaaagagacagaaaaatgggagaccagacatcaagtgcttcagctttgtctgatgtgttgaacaaagcgaagccatacttggctatcatatctctgcagtttggatatgccgggatgtacatcctttccaccatttgcatgaagcatggcatgagtaatttcatcctcgctacctaccgtcatgttgccgccaccattgtcattgcaccctttgcctttgtccttgaaaggaaaattaggccaaagatgaccctgccaatcttcctcaggattgtggttcttggcttcctggagccagtgcttgaccaaaacttatactatctgggaatgaagttcacaacagcaacatattcatctgctttcgtcaacatgcttnctgcttgtactttcataatggccatgattttc

SEQ ID NO: 4631 - DNA, 156 bp, Gossypium hirsutum
  unsure (1)..(156): unsure at all n locations; Clone ID: LIB3493-036-P1-M1-E3
gctaaagtgtttgcgcagcatgganccaaaggtttgattgctgatatccaagaggatttangtcatcnagtttntnangacatangcccttcaaactgttccttacagcatagcaacgtcactgatgaagaccaatttaaaaatgctgtgaacaaa

SEQ ID NO: 4632 - DNA, 157 bp, Gossypium hirsutum
  Clone ID: LIB3493-036-P1-M1-E5
attttctgggacttttggagtagaactgctgggaaagtagaaaagcatgggaacagttacagcttcacactttctttcgaggacttcccatggagctgaaactaaggccaatctgagtcagacagggttgaggaatcaatccatgactcacaatggg

SEQ ID NO: 4633 - DNA, 54 bp, Gossypium hirsutum
  Clone ID: LIB3493-036-P1-M1-E7
gaaaatggcggcgagaaatgccgagaaacgaatcccatcggagcgtgagtgggg

SEQ ID NO: 4634 - DNA, 61 bp, Gossypium hirsutum
  unsure (1)..(61): unsure at all n locations; Clone ID: LIB3493-036-P1-M1-E8
gcgatggcgagtgtgcgatctngggtggtagttcatcctctgggggagggggtccccctac

SEQ ID NO: 4635 - DNA, 253 bp, Gossypium hirsutum
  Clone ID: LIB3493-036-P1-M1-E9
attttattatcatactaaactcggaggcgaagttcaaaattataaattggttttaaaaaagccggaacaaaagagggagagaggcagcgaagaagagatgaaggaaaagtaatggtagatcgcaagcgctagaagttaccgagaagagtttatagatccctattatcggaaagagggaatttcagcggataacagaagtgcattttaatttataaaattatggggggcactggtgctacatgctcatggtttg

SEQ ID NO: 4636 - DNA, 443 bp, Gossypium hirsutum
  Clone ID: LIB3493-036-P1-M1-F1
ggtttattgctttatctctttggtgtttttggtttcacagaaataagttggttcatgaggggattaagctttctatgccacaactattgggatttatcaggggctatgagcgagatttatggcttgttcgtgagaatctatgtgtttctactgcttttatgagaaatgaagtctggaggcctcctgactatggttttattaaaattaattttgatgcgtcgtatattccaggaaataattgcgacaatagcaatcttagccagaaatcacagaggggaagttatagaagcagttacttatctggtggaaggtgtggacaatgcattcgtggcggaagcacgagcttgtgaaagagcgctgatcctcgcaaaattgaagggctttcgacggttgattgtgaaaagggactccctgacagtcattaaaaaactgattaaaaatga

SEQ ID NO: 4637 - DNA, 436 bp, Gossypium hirsutum
  Clone ID: LIB3493-036-P1-M1-F10
cggacgcgtgggtttgttttcctctgggtcgagtatcatcaaaaaccagccctaacagagcagctgaacctaacatcatcatcatccatggcggcaccgatctggctatgggctttctctgtagccctaactctggttccgtctgtttttggaaactctgaaggagatgctcttaacacgttgagaaaaagtttgaccgatccagataacatactccagagctgggatccgaaccttgttaatccttgtacttggtttcacatcacttgtaaccaaaataatcgagtcactcgagtagatttaggtaattctaacctgtctggacatttggtacctgagcttgggaagcttgagcatttgcagtatctggagctttacaaaaataagatccagggaaccatcccaactgaacttgggaacttgaagagcctaatta

SEQ ID NO: 4638 - DNA, 408 bp, Gossypium hirsutum
  Clone ID: LIB3493-036-P1-M1-F11
attcaacaaaacacaacgccactagagtttagtttgatcagcaactctctgctcttcttcttccttaaacaagcaaaaaaaaaaaaaattatgggtggagaaggaaaggtctatactttggctgaggtttctcaacacaacaatgccaaagactgttggcttatcattgagggaaaggtatatgatgtgacgaaattcttggaggatcatcctggtggtgatgaggtcctgttgtctgcaacagggaaagatgcaagtgatgattttgaggatgttggtcatagtagcagtgctcgggcaatgatggatgaattttacgtgggcgacgtcgatacatcaactatcccaactaagaccaagtacacccctcccaagcagcttcactatgagcaggacaagacctcggac

SEQ ID NO: 4639 - DNA, 236 bp, Gossypium hirsutum
  Clone ID: LIB3493-036-P1-M1-F12
aaagaagggaaagagtgggaataaaagatacggggacaagaagagggcagctaagagaactgaatcgaccatccctattttcaatatggaagacattgaggagggtgtagaaggatatgaggaagaaagatctcttctcatgtctcagaagagactagagaagcgatttggtcaatccccggtatttatcgctgctaccttcatggaacaaggagggattccaccatcaaccaatc

SEQ ID NO: 4640 - DNA, 472 bp, Gossypium hirsutum
  Clone ID: LIB3493-036-P1-M1-F2
gaaaatttaaccaaaatgtttgattttctttaacggtgtcgttcgcaacgttcttttcacagtttacctccgccggcaatccatccatcttccatcgcgtccccccccccccaaatgcaagcttcgccggcagcgcttcaatggccagctgctgcactgctaaattccgattctcaatctcatcttgccgcgccgcccggtcccctcggccgtttcccggcagtttaatacattcatttccgctctttcactctcctttcgctcgcccaatgaaacccacaaatctccgttctgtctcagcttcaaccgaagtttctgccggcgccgcctcttccactcccactttctcttggaacgacgtcgttcgcgtctctcaaccggagtttaatcccaacgattcttccaatctccgaggcttcttcgataaaatcaaagcttgcaaccgtggcgctgaattgcaatctgagttcct

SEQ ID NO: 4641 - DNA, 436 bp, Gossypium hirsutum
  Clone ID: LIB3493-036-P1-M1-F3
ctcttatcctttgtctatttccccgggggacagttgggggttgtggacttgccattttaagacaaagtgtgtaaacagagaatagataagtgacttttgtagatattgtaacaaatactttaggttttctttcttttctagtttcttcctctataatacaggagccgtcattttaaagtgcttcacaggtgtgtctccagctatgttcccatgtttggagaaaccgagtacgatccagtccgacaattttcatctggcccaattgaaggagaacttgatgctcttggcaaagctgttgatgctggtaagatcaaatatattggactcagtaacgaaacgccatatggtgtgatgaagttcctttattttgtataaaacaatgttcactaccctaagaatataagcgtgcataatttttatgggttggtttgccgaa

SEQ ID NO: 4642 - DNA, 67 bp, Gossypium hirsutum
  Clone ID: LIB3493-036-P1-M1-F4
gtcgcactatctgaatagttatggacttggagtgggggtgacacactatgacgctgcgaacaccact

SEQ ID NO: 4643 - DNA, 412 bp, Gossypium hirsutum
  unsure (1)..(412): unsure at all n locations; Clone ID: LIB3493-036-P1-M1-F5
tgacaaaaatggaaacagaaaattctaaagaggccggtgaaatcgaaccactcttacaggacccaagggatgagcctaaatccgaagccaaccccaacccgaatccgagcaccgtgaagacgagagtccccgaagtagagatccgattgtatcgacaaggcaagggtccgatcgacgtgttcaagtcgagcttgggtggatgggaccagaaccagcttgaggttcgagacatactcgacaaatacggcttgaaatcgatttacgctttcagtccccagtcgggtcgtggcgtcccaatccgctttcatcccagaaatgggaggtctattcttggatacaaggacngatcggtgggtcacattgacggcgagccacaggattcaattaatcaaacctggaaccaagggcttgg

SEQ ID NO: 4644 - DNA, 118 bp, Gossypium hirsutum
  unsure (1)..(118): unsure at all n locations; Clone ID: LIB3493-036-P1-M1-F6
agagagaacaccgaaggcgagtactcttgccgcgaacgcgangtcgtcccgggagtcctccaaagtcttaagttgataaccaaagtcttgtcggagcgcattgcaaaatattcatttg

SEQ ID NO: 4645 - DNA, 468 bp, Gossypium hirsutum
  Clone ID: LIB3493-036-P1-M1-F7
ctttgctacagaggtgttctctgaaacacgaggtgaggcttaagtctggtgtaattgtgccggctggagcaatacttgtcgtacctatgcagttggtgcagaccgatgattctagttggggaaatgatgctggcaaatttaatccatatcgttttctgtctaagacagaaaagacatccgcttcagaaaacatggatgcgtccattgcaggacatgctgaagaacataaagatcaaaggaaatgtacttttgttttgaaagatccgaataagaatccgacttttcttcccttcggttctggtgctcgtgcttgcgtttgccagaaatttgtcattcaaggagttgcaacgttgtttgcttccttgctcgaacaatacgaggtgaggcttcgttcaggatcaaagacagactcaaaaccgtcgacaaactactcaatgtctcaagattttctgagttccgagctaagtt

SEQ ID NO: 4646 - DNA, 466 bp, Gossypium hirsutum
  unsure (1)..(466): unsure at all n locations; Clone ID: LIB3493-036-P1-M1-F8
atttacactgaattcgaacttcaatggagtggaggtcggatgctatgatgccctggttattcctggcggccggttcacggagctcttcagcgtcgacgacagggtcttgagcattgttaaagcgtttgctgaagcaggaaagcctattgtcaccacttgccatagccaactcattttggctgcggcagggcttttgaaaggcaagaaatgcactgcctttgcaagcatgaaaccagtgattgagctggcgggtggtatttggtgggagcaacctggaatcacatcaccttttgacattactgcttgtctcaaagatggaaacatcttgagttccatangatggccagcgcatgctgaaattctcaaaactttgtttgaatccatggggagcccgaattcatacaaccaaaggtaactcagtgcttttcctttggggggactatgtaagaaaattatgaattcaatt

SEQ ID NO: 4647 - DNA, 459 bp, Gossypium hirsutum
  unsure (1)..(459): unsure at all n locations; Clone ID: LIB3493-036-P1-M1-F9
ttttaagggaagtgagaagctccttgagctaggctcaaattactccatgggttcaaacttgaaggagaatgaatctgaagtacggaaccaaggattcttcatgtcaccaatagtcttcttcatctgttagtagccattgttttgacaatcatggtataagaggatcacccacatcaacagtcattggaccttccaagcatcggcattcaactcttggggatcccaattttgtggagaattacttcaaggtgacatacatgtgcaatatagtgacttactaaggctgttcgagtatggggttttcctcctcatgctaattacctatttctaggcgactatgttgatcgtggcaagcagagtttggaaacttttggagataaccgagaagtggaacatggtttgtctgtaaaattgccagttcaaaagtaaattctncaagctacatcacattgaaaattt

SEQ ID NO: 4648 - DNA, 364 bp, Gossypium hirsutum
  Clone ID: LIB3493-036-P1-M1-G1
aaattttctttctcgattttctctttagccaagaaagatgcagatcttcgttaagactctaaccggcaagacgatcactctcgaggtcgagagctccgacacgatcgacaacgtgaagaccaaaatccaagataaggaaggcatccctccagaccagcagcgtctgatcttcgccggaaaacagcttgaggacggccggaccttggccgattacaacatccaaaaggagtcaactctccacctcgtcctccgtttgcgcggtgggatgcaaatcttcgtgaaaaccttgaccggcaagacaatcactctcgaggtcgagagctccgacacgatcgacaacgttaaggcgaagatccaagacaag

SEQ ID NO: 4649 - DNA, 227 bp, Gossypium hirsutum
  unsure (1)..(227): unsure at all n locations; Clone ID: LIB3493-036-P1-M1-G10
cttcgcttttctcactttgtagcccagtttagagttttcttcgaggtgggtttgctcnattccgcatttcgtctctcgaattcgccggcttgtgaatctcctctttgttctcggatcaaataattgaagtcttgaccttaaacttgaaggttagtggttgaaacaggtatctacatgggaaatgtgtgagtgcgaatcggtgaatgctttacttggatctttgagat

SEQ ID NO: 4650 - DNA, 434 bp, Gossypium hirsutum
  Clone ID: LIB3493-036-P1-M1-G2
cagcaatgccaagtggaaccggcgatccagaggctggacccccagtgataaagaaccgttgaataatgtgcgagaaattcaccagaaagcgttagatgaccttgtgaacgtgaactcgctcttcacgctggccgtcttcgtggggttatcgatggcacgtcaaggcgagcgtagcctcgagaaccgcactgaatgcgacgcggatgtggggaacgcgaggcggctggtggtgaacgaagtggtgtcgttcgcttgcttcctgttgtcgagcctggtagccaaggcacttaaaatccatgtcaccatttgccaagaagaggacttcaaggatacccgtaaccagattgtgagattctcaatgctgatgctgtcggtgggcgtcggttttcggatgcatattccttacggtatccatggtggatgtgatccaaatc

SEQ ID NO: 4651 - DNA, 263 bp, Gossypium hirsutum
  unsure (1)..(263): unsure at all n locations; Clone ID: LIB3493-036-P1-M1-G3
gatggagtggtccctgtccaaagcaacaccgggcaaggtccnatgatcaacgagcactgtttcgacatggagttcactacaccaaaagccttcccttatggctacaactacaactgtaactacaaccctcactgtcttagtcacagtgtaagcaaaagagcagctacttcatacttcttccataattaaagttcgaacccttcactatcttactgtttttgcaggtatcatcttcttctctggatgttggggtagttccagat

SEQ ID NO: 4652 - DNA, 168 bp, Gossypium hirsutum
  unsure (1)..(168): unsure at all n locations; Clone ID: LIB3493-036-P1-M1-G4
aataagtttgatcgtggagccatgcanatcagctcagttaaaggcaatggaagtggccaaannacctnntccactactctcatatgatccaaaccttcgcttgccactttggccttcacctgatgaggctaggaaacatattttgtccatttgggataaggcagatat

SEQ ID NO: 4653 - DNA, 461 bp, Gossypium hirsutum
  Clone ID: LIB3493-036-P1-M1-G5
ccatttctcaaaccatacctgtaaaaccaggggtactgtatgcgctgacatttggggcgtccaggacttgtgcgcaagacgaggtgttgagagtgtcggtgggtactcagtcaggggacctccccttgcagaccttgtacagtagtatgggtgatgacgtttatgcttggggtttcattcccaaaaccaagtatgtcactgttaaattccataacccaggtgttcaagaggatcccacctgtggtccattgttggatgcggttgctattaaggagcttgtccgtcccagagctaccagatataatctggtgaagaacagtggctttgaagagggtcctcatcgcctagtcaactccaccaatggtgtcttgcttccccctcggcaagaggatttcacatccccactcccgggctggatcattgaatcacttaaagcccgaaaattcatcgatgcaaagcac

SEQ ID NO: 4654 - DNA, 228 bp, Gossypium hirsutum
  Clone ID: LIB3493-036-P1-M1-G8
gacccaagaacaaaactgaactgcgggcaaagatgtacagcgagtgcaagagtgacagaaaggatccgcaaggctcttgaagcttatgatggtgagccacctttgaatgtccagaaatacgttcttgatgagtgcagaaagtggaatctagtatgggttggaaggaataagggtgcgccactcgaagctgatgaggaggaaaggcttgtgggtttcaataagaaccat

SEQ ID NO: 4655 - DNA, 347 bp, Gossypium hirsutum
  Clone ID: LIB3493-036-P1-M1-H1
aaagctccaagtcccgcacctcctccagctacactcagtgccagctcgccagcacttgctcctttaacgagttctagtccagaattacattccattgcaccaccaattgccaacaaacgaagtgaaattcctactttgccatatcaaagtgcttctgaggttgcatcctctgtcatcggggtttcaaattctattcatgtggaaacatctacaccatcattggtaacccctggtcagctcttgcagtcaggatctactgttgttccttcatctcagcctgcagcaactgcacataaagatgtggaagtggttcaagtgtcctcatcattatcgcctgaaccatcagt

SEQ ID NO: 4656 - DNA, 366 bp, Gossypium hirsutum
  Clone ID: LIB3493-036-P1-M1-H10
gttttcccaacttacaaacccaaggatattgggcaagacattaaacaggagtttggcatacaactgaactactttcaggcttggcgtggcaaagaaattgctagagagcagcttcagggttcatacaaggatgcatatagtcagttaccacttttctgcgagaggataatggagaccaatccaggcagttgtgctacattctccactaaggaagactctagttttcatcggctctttatcggattccatgcttctctgtccggctttctacaagggtgcagacctctccttttcttgatagcatacccttgaattccacaaattaagggaccttggtggcagaaccggttgcggatgggaatagtg

SEQ ID NO: 4657 - DNA, 300 bp, Gossypium hirsutum
  Clone ID: LIB3493-036-P1-M1-H11
ataaataagaacgcgtcagaaatacaaaccagggatctacatatctgtccgagtgccatccgagaccatctcatggattgcactgggaaagaggtcaccagacagggacagcctccatatctagggctctacagataacagtgaggcactcaaccctactgaggctaatgcaacgactgacatcttaccagatgctcatgcagatcaaaaaagtctgaagattgatactgtaaaactgaatgctgctggtgcagcttacaaatcaagtgaccgatcaaagagcaatttggatcaaaagat

SEQ ID NO: 4658 - DNA, 385 bp, Gossypium hirsutum
  unsure (1)..(385): unsure at all n locations; Clone ID: LIB3493-036-P1-M1-H12
ctctaatactactcactatgcggaaagctgttgcgcctccgggtaccaatcccgaattccaggctacgacctcacgcgtatcggttatcatgaattttctctctctagaactcgcctttctgtgtttgtttccctagaaaaaaaaaaccccaaaatttcccccaattcaagatttgtgttttcttcttcaaattgaatccgaatcttttataaaatttctcttttgggttttcaagtgatgtctntattgccaaagagcgattcaattcatatccgtgaggtatgggatgataacgttgaggaagaatttgctttgattcgtgaaatagttgatgattatccttatgttgccatggatactgaattcccaggcattgtattacgt

SEQ ID NO: 4659 - DNA, 349 bp, Gossypium hirsutum
  Clone ID: LIB3493-036-P1-M1-H2
caacatcaaatatcttacaagcagtaaattgatgggcttagagttaaaagatccaagtttcaggcgccacattcttttgcagtgcctcatactatttgattatcttaaggccccaggaaagaatgataaagattcatctgaaagcatgaaagaagaaattaattcttgtgaagatcgagtgaagaaactactcgaagtgactcctccgaaggggaaagattttcttcatagtattgagcatatattggatcgtgaaaagaattgggtctggtggaaacgcgatggctgtcaaccatttgaaaagcaaccaatagagaaaaaaacagttcatgatggaactaagaaacgt

SEQ ID NO: 4660 - DNA, 461 bp, Gossypium hirsutum
  Clone ID: LIB3493-036-P1-M1-H3
ctcctatccctttttcactaagctctctctcggcatcgtccgcctccaagagaagacagagaggtctcctcacaaccaccgtaatgggtcgtgtcattcgagctcaacgtaagggtgccggttcggtcttcaaggcccatacccaccaccggaagggtcccgcccgtttccgcagcctcgacttcggtgaacggaacggttacctcaaaggtgtcgtcaccgacgtcattcacgaccctggccgtggcgctccgttagcccgcgtcgttttccgccaccctttccgttacaagaaacagaaggaattgttcgtcgccgccgagggtatgtacaccggacagttcgtgtattgtggtaagaaagctacccttatggttggaaatgtgttgccccttagatctatccctgaaggagcctgcgtttgcaacgttgagcaccttgttggtgcccggggggttttc

SEQ ID NO: 4661 - DNA, 458 bp, Gossypium hirsutum
  Clone ID: LIB3493-036-P1-M1-H4
cctctttccacccccaccaaaaaaaaaaaaatcaaaatcctctctgaaagaaaatcttcaataaacggcgctctttatccgcaacttcaaagatccgtttaagatccgaattccctgcccgtattttccctctcgtgattccacctcagtacgtaccgatttcttgacccgctcggtaatttcttgagtttttttggggctgattttaaaaggagcttgatattcgactgaggatctgtgagattatcgttttttgctttttagtttagtccgatggcttctataggtatggcgcctacttctgggttaagagaacctagtgggaatgcagttggtgttgatagattacctgatgaaatgaatgatatgaaaattagggatgacaaggaagtggaagcagcgatagttgatggtaacggaaccgaaactgggcatattattgtcaccactattggggg

SEQ ID NO: 4662 - DNA, 438 bp, Gossypium hirsutum
  unsure (1)..(438): unsure at all n locations; Clone ID: LIB3493-036-P1-M1-H5
gcttatcactctttgaggaaccaaacaagctagttattaaaagtacgctgtgaatcgcccaaacatgagccgacatcccatcgtgaaatgggcccagagattggatgatgtcttcataactattgagcttcctgatgctcaggacgtgaagcttaaactagagcccgaaggaaaattcttcttctctgccaaaagtggagcagacaaaattccctatgaagttgatttggatctacatgacaaagtcgacgttgatggaagcaaggctagtgttggaaatagaaatatctgttaccttgtgaaaaaggctgagagcaagtggtggagcagattactgaaacaggaagggagacctcctgtgtttttgaaagttgattgngatcgatgggttgatgaagatgaggacgatgtggatactaagcccgcacctgatatgga

SEQ ID NO: 4663 - DNA, 458 bp, Gossypium hirsutum
  Clone ID: LIB3493-036-P1-M1-H6
acctcacgcttatggtcacatgaagtggctacatgaaaaccagtgccagagtcatagcaaattccataataaacctctcaaagaaaggcttgatagagacaaatgtccacagcggaagaaaaataatgatataaggctactttgctatcaataaacaactccattacaaaggtcagttccactgatgaatcccaaggcatgaatactatctaagttacttacgtgtttgtaaccgaaagtgatccttactatataagcaggcaaataggagaaattaggatatagaagtttgagttttacataggaataatactcataggagcatgggtgtgtctcgagttgttattcgattagtttgcaaggcagtatcttagggattagcttggcttggtcttccttgtacacgaggtatggcctcttgccgtgtgtctaccttctctcttaggtatcgaataact

SEQ ID NO: 4664 - DNA, 248 bp, Gossypium hirsutum
  unsure (1)..(248): unsure at all n locations; Clone ID: LIB3493-036-P1-M1-H7
cggacgcgtgggtgctcactctctttggctgggattcatatgcgggattggttcanatcgtaaaatcaaaaccaaattttcgtttaatttatacatataaacacccaaaaaacaaaaagggcataaaaaaggagattcaatggggatcttctccttcaatgccataggtttggccttgttattagacattatctccggggcacgtaatgcttgccctcatttcgaccgataagaatttgtagctttaa

SEQ ID NO: 4665 - DNA, 361 bp, Gossypium hirsutum
  Clone ID: LIB3493-036-P1-M1-H8
gaaatatttgcagttatggaagaaaacccacaacagcgttctcatctcaagcgccaattcttcgaagaccaacactccaacaagcctcccgcgcaaaagagggttaggtttcccaagggaaagaaggtaaagcctggagaagaagcaccgaacagagttgatattgaagacggttcaggtgacttgaaggatcctcgtctcgccgctaaggagcgggccaaacgccgcagtcaaattactacggagctatttgctgaagatgggagaggaatgcttaatgatgtatcagctgctgaaatttcatatgaggataatgagaactttcgtgatgatggagttcaaatagaacctttcaatctta

SEQ ID NO: 4666 - DNA, 395 bp, Gossypium hirsutum
  unsure (1)..(395): unsure at all n locations; Clone ID: LIB3493-036-P1-M1-H9
cgatgatgnncctcagatgttcttaaagatgcgttgggttcgagcnagaagcgaacatgaataactattatgagggctgtactgcaacagttcttcttgtttgggctgatgctgacgaaaatttctatgcacaatgtgcaaatgttggggattcagcatgtcttatgaatgtcggaggtaagcagattaagatgacagaagaccataaaataagtagttattctgaaagactccgaatggaaggaatgggggagccattaagagatggggagacacgtctatgtggtttgaacctcgcaaggatgcttggagacaagtttgtgaagcaacaagattcacgctttagttccgagccttttataagggaatctgggcatatcaatcaaacaagtggg

SEQ ID NO: 4667 - DNA, 474 bp, Gossypium hirsutum
  Clone ID: LIB3493-037-P1-M1-A1
aaaacaccaaagcaaagaagtagaaagagaaaaatcaaaaatggggagaggcaagattgagatcaagaggattgagaactcaagtaacaggcaggtcacttactcaaagagaaggaatggaatcatgaagaaagctaaagagattactgttctttgtgatgctaaagtttctcttatcatctttgctagttctgggaagatgcatgaatattgcagcccttctactaagttgattgatattttggaccaatatcagaaaacttctgggaaaaagttatgggatgctaaacatgagaatctcagcaatgaaatagatagaatcaagaaagagaatgatagcatgcagattgagctcaggcatttgaaaggggaggatatcacatctttgccttacaaggagctgatggctttagaggatgccctcgaaaatggccttacctgtgtccgtgccaagcagatggatgttcttgatat

SEQ ID NO: 4668 - DNA, 461 bp, Gossypium hirsutum
  Clone ID: LIB3493-037-P1-M1-A10
cccacgcgtccgggaaattcatcttcctcaatgacgtggaggtcctttgtgaagtgcccgagtcatatgaagcatacaggaagcagcaacaccgctggcattcaggacctatgcacctcttccgcttatgccttccagcaatcataacttgcaagatagctatatggaaaaaggcaaatttaatactgctattctttctgttgaggaagcttatccttcctttctattcattcacattgttttgcataattcttcctctaaccatgttcgtaccagaggccgagcttcctgtttgggttatttgttatgtacctgtttttatgtcattcctcaacattcttccatcccccaaatcgttccctttcattgtcccttatcttctatttgaaaacaccatgtctgtgaccaaattcaatgcaatggtatctggattattccagttgggtagctcctatgagtgg

SEQ ID NO: 4669 - DNA, 466 bp, Gossypium hirsutum
  Clone ID: LIB3493-037-P1-M1-A11
cagaatttttgagtcccaagttctggaggaaacctgaaggtcggttttctacttcaaggttatcttcttctgggcgcatgctttccctaaatgctgcacataacatacctgataaagattctcgcgctgaaacgtatataccagcagtcagccaaaggcatcagcatcaaggttgcggtggatttatatttccagtggctgatggttgcaacggtataactgataattcagggtcctcaaatagattgtcaaagaataccattcaaaatgctgagagggttcagcttggaaatggtagcgatcctgatgggacgactttagttcgttgtactgcaccaatgaaaccttagaagcaggtaatgtaatttcactgtattttattatataattctttattcagatcaataaatgctcttcgaatttgctatagtttatggctgtctagaggctttgtgcacttgagtca

SEQ ID NO: 4670 - DNA, 475 bp, Gossypium hirsutum
  Clone ID: LIB3493-037-P1-M1-A12
gatcaatccaaaacctctgacccccaaaagaagatccgaaacccaaataattttccgactccatttctctaaattctgctatcgaaacatcatgagttttctcgcgggaaggctagcaggaaaagaaggcgccttctttttccaggaatccaaacaagccgtcaaccgtttggtcgagaaaacccccaaaaacctcccatcaaacccaccgtcgcttgggcaacaaactcaagctgacgtccttcctgaggtcctcaagcattctttgccttctaagatcttcaggcaaccctccgatgcttcgtctctatcgaggtcctccaagtgggccctccatcctcatccaaccaatgcctccagttcttcccctgatgccttgaaccctctcagggcttatgtttctctaccccaggttacttttggccccaaaaggtgggagttcccaacaacggaacattcaaccatggcatcgacg

SEQ ID NO: 4671 - DNA, 468 bp, Gossypium hirsutum
  Clone ID: LIB3493-037-P1-M1-A2
gaaatccagagctttgcttgttaagttcttctcagcttgatgagaagccgcttttccctttgcatccttcaagtgatggtcactgctttgcatcacagaagaatgttgtttcagggaataaaagagggttctctgatgcaatggatgggttctcagagggcaagtttctttctgattcaaaagttgatgttatgctgtcacctaggccttcttcaaacttcggggctcaatcaatgaaagcaaaagaaatcacaagccaaaacgtggtgcatgacaggcctcatgctgctgacaagatcaggcctaatcccaatgcatctgcaaacaataacagcggagcacctgctaacaaggcacaggttgtaggttggccacctatcagatcatttaggaagaactcattgtcctcggctttgaagaacactgatgaagtcgatggaaaggcaaggcctggtgctttgtttgtga

SEQ ID NO: 4672 - DNA, 417 bp, Gossypium hirsutum
  Clone ID: LIB3493-037-P1-M1-A3
acgcgtttaggtaaatatggaggaaagcctcgtcttggtggtcctaggtcgacattgtgcatatcgtctcaggttgggtgcaaaatgggttgcaaattttgtgcaactggaactatgggatttaagaacaatttgacgtccggagaaattgtggagcaattggttcatgcttctcttttaactaacatacgcaacgttgttttcatgggaatgggagaaccactgaataattatactgccttggtggaagctattcgtgttatgacaggatcaccgtttcagctgtcaccaaagagaatcacagtataaacggtagggattattcatgctatcaacaggcttcatggcgatctaccgggctggaacctagcagtttcattgcatgcaccagttcaagagatccggtgtaagataatg

SEQ ID NO: 4673 - DNA, 428 bp, Gossypium hirsutum
  Clone ID: LIB3493-037-P1-M1-A4
atttattgagagtctgttgtctccttgtcattagtttgtgtgtgctacttcactctccctgtgtcttcaagaaatggatcgtagaagtgcatttgcagttgttttgatttgttttgtggtgaccgctgttggtggtcaatctccggcagcctcacctactaaagctccgccggccgcgactactcctgctactgctcccgctactgcccctgttagcaaacctaaatcaccggctccaactgctgcccctaccacttccccaccaacttcttcaccaccggttgcggctccggagaagtctgcggcggttccagccccatctaaatctgctccgtcttctcctccggctgctgctccggtgagttctccaccggctccagtacctgtgagctctcctccagccagatcgcctcccgttgctgcaccga

SEQ ID NO: 4674 - DNA, 480 bp, Gossypium hirsutum
  Clone ID: LIB3493-037-P1-M1-A5
cacaaactcccatcacccgagatcatctttccccttcagaatggcggctgcaaccatggctctctcttccccatctttcgccggaaaggccgtcaagctctctccttccgcccctaaaatccaaggcaatggccgtgtttccatgaggaaaaccgctaccaaggctgctccctctggaagtccatggtacggtcctgaccgagtcttgtacttgggtccactatctggtgagcctccatcttacttgaccggagaattccctggtgactacggttgggacactgctggactctcggcggacccagagacatttgccaggaaccgtgagctcgaagtcatccactgtaggtgggctatgttgggtgctcttgggtgtgttttccctgagcttttggctaggaatggagtcaaattcggtgaggctgtgtggttcaaggccggatctcagatcttcagcgaaggtgggcttgactacttggg

SEQ ID NO: 4675 - DNA, 484 bp, Gossypium hirsutum
  Clone ID: LIB3493-037-P1-M1-A6
gttgatgaacttggaaggcgaaagattgctttgggacaatatgtgttgcatgtggggaacttcaaacacacattgagcttgaggattcgaagatgaaaatttcttttttcaaaatccctcacttctttttttctttctcttttggcctaaaataagtagcaattttctcagctttctttctttctttaatgtatagccaattgttcaaacatttgaaatccaaaactgaaaaaagaaaatgttgattttcaaaaaaaaaaaaaaaaaaaaaaaaaaaaaaaaaaggggcggccctgcgactaaacaaaagatcgaattaaagtagaatcagaagcaaaaatcgccgaggaaaacaagatgtcggggcagcaagaagaagataagaagcccggcgatcagtccgcggctcacatcaacctcaaagtcaaaggccaggacgggaatgaagttttcttcaggatcaaaaggagcacacaattgaaga

SEQ ID NO: 4676 - DNA, 432 bp, Gossypium hirsutum
  Clone ID: LIB3493-037-P1-M1-A7
cggacgcgtgggccagtatcgcggaattcgcgagcgtgcatggggtaaatgggctgctgagatccgtgatccaaggaaaggggttagggtgtggcttggaacttttaataccgctgaggaagctgcacgagcttatgatgctgaggcactgagaattcggggtaagaaagcaaaggtgaacttccctgatgagactccacgtacctctccaaagaatgctgctaaaatgaattcccagaaacctctttctgggtcaaatttgagttctgttcaatcaagtctcaacccagatttcagttactcaaacaaacatgagcagggctattatgataccatgggtttcatagaagagaagtcactaatggatcagtttgcatatgcagaccctgttagagctgctgtagatgatgggttaaaaccctttgctgaacc

SEQ ID NO: 4677 - DNA, 372 bp, Gossypium hirsutum
  unsure (1)..(372): unsure at all n locations; Clone ID: LIB3493-037-P1-M1-A8
ggagaaatctgctttgataatctgtggcgactacatgggagatttcgaagtgatggtgcctttccaagtgctgcaagcctttggggttcgagttgattgcgtctctcccaccaaattacctggtcaaaaatgcttcactgccatccatgtgtccttgggatttgagcattactcagaactgccaggccattcatttacactgaattcgaacttcaatgaagtggaggtcggatgctatgatgccctggttattcctggcggncggttcacggagctcttcagcgtccacgacagggtcttgagcattgttaaagcgtttgctgaagcaggaaagcctattgtcaccacttgccatagccaactcattttggc

SEQ ID NO: 4678 - DNA, 472 bp, Gossypium hirsutum
  Clone ID: LIB3493-037-P1-M1-B1
attgagccctttttttcctctcttcccgaaaaggaaaaaggggaaagcaatcacacccaataacactttcagtagtaaacaaagcaaaaaagcaaacccccaaaattagttgaaaagaaaatgcctacaccaccggacaccagcaaaaccttgaaattagagagatacaacaattatctccgaaaaattcacagcaccaaactcatctcggcttcctctaaacttctctttcgtgcaacccttctcattgctttgattctgatcctttttttcaccatcaattaccctcctctttccgatactccccaccatgttcctcctcaccaccgtctccaccaccacagcttactttccacttcccttttctccgccgggggcggtgccgcctgggagaaacaagtgcgactctcttccacgccacgtagaaccaatgggttctccgttttggtcactggcgccgctgggttcgtcg

SEQ ID NO: 4679 - DNA, 475 bp, Gossypium hirsutum
  Clone ID: LIB3493-037-P1-M1-B10
cttatctatatatctccttttcttcttcttcttcctgtgctcaccaaggaaatcacaatttagcttctaactttgcctctttttttttcttttcatctgcaaatctggtcctttttttctgatgctggagagtttgggtattagatttaaattagtttgaagggctttcgagttctgggttttccattttggggtaacacccaggttagtcaaattgtggacatcacggctatacacagagtttaccggcctcttcttattcatgcccgatctgtacgacgtaagagttgtgtgatcgagaggaaccctgcgccgcacggcgggcgtggagctttgccttctgaaggcggtagtccttccgatctcctcttccttgctggcggcggtgttgtcttttagagtttcagtagttggtataggtagcttttagtataaaaaaaaagaaaaaaaaattactatcgaggaagcttattta

SEQ ID NO: 4680 - DNA, 470 bp, Gossypium hirsutum
  unsure (1)..(470): unsure at all n locations; Clone ID: LIB3493-037-P1-M1-B11
gaagcttcaaggaacgggattgagttcggattcgggtgtaggaaaccggaaccttggttagggttaggttcaagcacanaggaggaagagcagtgtaattggctgtggtccttacaccctcatgcttaccagtaagcctttcttatgctaccaatgcaaccaggacctttaacgtaacgatatccccatcctgttgtgacaccccttgtaccattagcaacgacggttcccttgtacaatacgacaacccaaaccctaataaaggttcccgatctgtaccacgtaagagttcgtgatccagaggatccctgctcctgacggttgtcgtggacctttgccttcttaaggcggtagatcttgcgatcttctttttcttgatggaagcggtgttgtgtttttaagtgccattagttgcgttaggttatttgtactataaaaaaaaggaagaaaaattatttttctggaaactt

SEQ ID NO: 4681 - DNA, 470 bp, Gossypium hirsutum
  Clone ID: LIB3493-037-P1-M1-B12
cggacgcgtgggttaacgaactcctttctttcggtagatctctcgtccttccatctctggttttctttttatcttacattaatataatcaatatctcatagttctttccttgttgttcctcttatttgtgtgtttttgaatgctcatcaacatcttgtccctgatgtttgaggactcatgtctcccgtactcagtgaaatcctcctttctgggtttatgataaactctactctgaggcgcaggacccatcttgttcaatctttctctgttggtttcctttactggttctacgttttttcatgaactctctctctctctctctctctctctctctgattgtaaccccatagcccgctcttattttcttcagcttttcttcaccatttttcataaataattccatatctgagtttctttgcataataaaaattctgggttctgaggccagatattgtttcttctggtttttt

SEQ ID NO: 4682 - DNA, 475 bp, Gossypium hirsutum
  unsure (1)..(475): unsure at all n locations; Clone ID: LIB3493-037-P1-M1-B3
ggctaacagaggagcagagaagggccgatccaaaatgtcgaagcgaggaaggggaggtagtgcggggaacaagttcagaatgtcgctgggtttaccggtggcggctacggtgaactgcgcggacaacactggggccaagaacctctacatcatctctgtcaaaggaatcaaagggcgtctcaacaggctcccatcggcttgtgtcggtgacatggtcatggccaccgtaaaaaaaggaaagcccgatttgaggaagaaggtgttgcccgccgtcatcgtccgacaacgcaaaccttggcgtagaaaggacggcgtctacatgtacttcgaagataatgctggtgtcattgtcaatcccaagggagaaatgaaaggatctgctatcactggtcccattggaaaggagtgtgctgacctgtggcctagaattgcaagtgctgncaatgctattgtttgaaaggtttncatggttttg

SEQ ID NO: 4683 - DNA, 434 bp, Gossypium hirsutum
  Clone ID: LIB3493-037-P1-M1-B4
gtggtattggaactgtccctgtgggtcgtgttgaaaccgggagccttaagcctggaatgggtgttacattgggaccttctggattgaccactgaagttaagtctgttgagatgcatcatgaagctcttcaagaggctcttcctggtgacaatgttgggttcaacgtgaagaatgttgctgtcaaggatctcaagcgtggatttgttgcctccaactccaaggatgatcctgccaaggaggcagccaacttcacctcccaagttatcatcatgaaccacccagggcagattggaaatggctatgcaccggtcctagattgccacacctcccatattgctgtcaagtttgcagagctcttgaccaagattgacaggcgatctggtaaggagcttgagaaggagcctaaatttttgaaaaatggtgatgctggtatg

SEQ ID NO: 4684 - DNA, 463 bp, Gossypium hirsutum
  Clone ID: LIB3493-037-P1-M1-B5
gagatgtcaagcctcacaatgtcatgatagatcatgagctgcgcaaacttcgcttgatagactggggacttgctgaattttaccatcctggcaaagagtataatgttcgtgtggcttctcggtactttaaagggcccgagcttctggtagatttgcaggactacgattattccttggacatgtggagccttggttgtatgtttgctggaatgatattccggaaggaaccattcttctatggccatgataactatgatcagctagttaaaatcgccaaggtactagggactgatgagttaaatgcatatttgaacaagtaccatttagagttggatcctcaacttgatgcacttgttggaaggcacagccgtaagccttggtccaaattcattaatgcggataatcagcatcttgtttcttcagaggcaattgattttcttgataagttgctggggtacgatca

SEQ ID NO: 4685 - DNA, 435 bp, Gossypium hirsutum
  Clone ID: LIB3493-037-P1-M1-B6
tatcagaacttgatattaacgaagatgaagcgttagccatcaactttgttggcacattacattccatcacagccgttgataatcgtagggatcttgtgatatcgaatttcaggagattgcaaccaaggataatcacggtgatcgaagaagaagctgatcttgacgttggggttgacgggttcgagttcgttaaaggttttcacgaatgtttaagatggtttagggtttactttgaagccttagatgattgttttgagagaacaagcaatgtaaggttgatgctggaacaagcagctggtcgagccataattgatttggtggcttgttcgccgtccatgtccattgagatgcgggagccagcgacccgctggtcctggcgggttaaagcaggtggatttaaccccggggttctgagtgatgaagtgtgcgatgatg

SEQ ID NO: 4686 - DNA, 470 bp, Gossypium hirsutum
  unsure (1)..(470): unsure at all n locations; Clone ID: LIB3493-037-P1-M1-B7
cggacgcgtgggtggctgttggaggtcttccagaaaagatactaactgcataccaatctgtgctcgaggacaatccaagtgaggatactgttttaaacaagtgtaatgctgctgtacaaaatttgagtaaactagaggaaaatgctgaaagtnnnttagctcaagggaatcagaatggatctgctttgctagatgagctacagntgnaagaaaatgctctccgccaatgtgttgaacaacttgaaagcattgaaacaaccagggctgccttgatttttcaacttaaagaagcacttcaggaacaagaatcaaagctggagcttatttgtagtcagcttcaggttgctcgtggtcagattgagcaaggaagcaatttaaggaagaggctgactttaccctctgtgcatggccatgtaactactacatctatccctacaggtgaggctgtagctgtgagtgaacggaacctt

SEQ ID NO: 4687 - DNA, 459 bp, Gossypium hirsutum
  unsure (1)..(459): unsure at all n locations; Clone ID: LIB3493-037-P1-M1-B8
gtaccaaaagggtgtgtgtgtatatatatatgttgcgtgtatgtgtgcattattatatatattgggtttttgtttctttcatagtttatatatatattatctttctgctaattttaactccatttcagcctccattgaaaagactcctgacaatgttcttggggtaaaaacaaggctaatggtgattcttttggcatttncaattatggtatgattgaaccaagttgaatttgaatgataggaagcttagtctttgaatctagttggattgaatctgcttcaagaattaatcgagttcaattaaatttatttatcgatttttatacttaaacttaaatttaaattcgactaaactcattcatattatataataaaagaaaaaatataatttcattataaatatatattaaaatgaacagctcgattaggattttaagctgtccaaaacgaatattatag

SEQ ID NO: 4688 - DNA, 478 bp, Gossypium hirsutum
  Clone ID: LIB3493-037-P1-M1-C1
cattcacgaagatcatgttgtcccaaaaggtgctgaaattggtactcttggttttggttttgaaggtggtcctgataaatgttgttcttctggatgttccggtaattgtaatcctggtggtttcgttctaccatttcctcaaattccagaaatcccaagaattccagaaatcccacaaatcccacagatcccacaaatcccacaaattccactaatcccacagatcccacaagtcccacagatcccacaagtcccaaaaatcccactaatgccaggacagtcgggatgtgagagtggagagtgttgccgtcagggttgtggtgggacttgtgctgagtgtggtcagcccaggtgcgcatcaggatgttgccaggctgaaactgtaaagagcaaagggatagaagaggttatggacagtgaacccagtccaccaaagtagagagatgataccatattaagatgaaataacgaggaagag

SEQ ID NO: 4689 - DNA, 475 bp, Gossypium hirsutum
  Clone ID: LIB3493-037-P1-M1-C10
caaagttgcagctgctgtatcctctagggttgggtctgggtgggcctttctgctttatcaatttttgtaggagaggcttccaaacgatcccgttgtccggcggcgcctcccctgccaagatgtcaatggagttctattcgttcgggccatataagatagaccccacggaagtcttctacaccacccccctttcctatgccatggtcaacctccgtcctgttgttcctggtcatgtacttgtctgcccaaggcgtgaagttaagcggtttgctgatctcactgttgaagagacccaagatttatggctaacagctcagaagattggtggaagacttgagtgcttccataaggcgtcatcactcacttttaccatccaagatgggccaaaggcagggcagacagttccccatgttcacattcatatacttccaaggaaagatggtgactttgagaggaatgatgaaatttatgatga

SEQ ID NO: 4690 - DNA, 407 bp, Gossypium hirsutum
  Clone ID: LIB3493-037-P1-M1-C11
cgatttcattccccttcccttcctctcgtttgcgcaggagcggacccgccggtgaccgcagaccaaggagagaataacaacgttgatgaagaggaggaagaagaagaagatgacgacgatgaagagggagacgaagaacccgaatcgtactcggccgaaacgggtcgaaacacgcaacaagtcccgacagaaaacactctggcagtagtggcggcggaggagccgagcgagttaatgcaattggatatgtcggaagatatcaagctcgggtcacctgacgatgcatcgaataacttggactcggatttcaatatgttggcggtgagtcaaagcgggaacccaaccgtcaatcaacggggagctgcgttgtttacagatgagtctaatcgggggcggctagtggtaca

SEQ ID NO: 4691 - DNA, 478 bp, Gossypium hirsutum
  Clone ID: LIB3493-037-P1-M1-C2
ctcggcttgctggaatatttgttggtgctgctcggaacaaacgcagacctgagattttaaagattgttaaggaaggcattgggtatgcttttgaagacactccaagacacctgtcttttctggaagcttctgtgctacattttgcgtcaagacttcctgcacctgacatacgagacattctgaaagatgtccagaagaggacagagaatgtaaatgcagaagaggatccaagtgggtggcgcccttataatacattttacgagagtttgctggaaaagtgtgcaaagaatgaagggatccaagatgagaaggaatggacaactacaagacaaaggggtcgtcctaggaagcggcaaaatattgaggggaggagactttttaatgagcatggttcaagtgatgaagaggattcaattaacacattagaccaggaagatgctcaggttgagggagatgaggaagatgataatgctcctct

SEQ ID NO: 4692 - DNA, 477 bp, Gossypium hirsutum
  Clone ID: LIB3493-037-P1-M1-C3
gttaatttcaataacttcttttgattccactgagcttgaacagagtcttcagaatttcaaattgaatcctttttttttttctgttataatccaccttatcgtacggtgaaaaggagagaatatctgcgaaatggaatccactactgtaacgaatccattgccgaactcgaattccgaccgtgtcagaaggaagaagaaaaagaaaacatcagcagcggcggcaacggcgacgttgaagacgaatcagcagcggcagaaccaaaaccagagcaacaatcacaccagatggaaatccgaggcgcagcaacaaatctactcttcgaagctgattcaagctttgagtcaagtcaatctcaacggtaaccattcttctccttcggctccgcgtcgtggacgagccgttcgtgaagctgctgatagagctttggctgtagcggctaaagggaggacgaggtggagccgtgctattttgacgag

SEQ ID NO: 4693 - DNA, 460 bp, Gossypium hirsutum
  Clone ID: LIB3493-037-P1-M1-C4
aacaaattgtcaaaagttattcaaccttctacagggcgagtgaaaggtggagctgatggcactcccggaatgcgacagagtcgttcagatggttctctcgatacaatgcctcgaagacctgttgatcctgaagaagaacttcgatggatgtctcaagaagttcgtggttatgtcgaagctgtattgaacagtttagctgccaatgtccccaaggctgttgttctttgccaagtagagaaagctaaagaagacatgctaaatcagttatatagctccgtcagtgctcaaagcacgaataggattgaggagctacttcaagaggatcaaaatgtaaagcgtagaagggagcgtttccagaagcagtcatcacttctttcaaaattaacgcgccaacttagcatacacgacaatcgagctgcttctgcttctgattggtctgacagtggcgctggggcagaaa

SEQ ID NO: 4694 - DNA, 480 bp, Gossypium hirsutum
  Clone ID: LIB3493-037-P1-M1-C5
ttcatttcttctccattcctaaaaatctctccacaatggttgtgagaccagtttcatctttgtgtgtgcaagccaagcaaggggataatctaatttgttcccttaagggctcccctgtaacatcatcatcatcatctgctttgagttttctgcccagaaaacatggaagggctttgggtgtttatgcatccataggaaccgacaatcatgcacttacaggggtagtgttccagccttttgaagaggtgaaaaaggaggaacttgacatcccaatcgctcctcatctttcgctggctcgccagaaatatgctgatgcctgtgaagccgccatcaatgagcaaatcaatgtggagtacaacgtttcctatgtgtaccactcgttgtatgcttacttcgacagagacaacgttgcgctcaaaggcttttgcaaattcttcaaggaatcaagtgaagaagaaagaaagcatgcagagaagctga

SEQ ID NO: 4695 - DNA, 442 bp, Gossypium hirsutum
  Clone ID: LIB3493-037-P1-M1-C6
cgtcgtgcccggaccctgtcgcaccaagaggcgctgtgtacgagtcgggttgtttgggaatgcagccctaatcgggcggtaaattccgtccaaggctaaatacgggcgagagaccgatagcgaacaagtaccgcgagggaaagatgaaaaggactttgaaaagagagtcaaagagtgcttgaaattgtcgggagggaagcggatgggggccggcgatgcgccccggtcggatgtggaacggcgagagccggtccgccgatcggctcggggcgtggaccgacgcgggtcgtggcggcggcccaagcccgggcctttgatacgcccgtggagacgtcgtcgcctcgatcgtgggattcagcacgcgccgcctcggcgtgcttcggcacctgcgtgctccgggcgtcggcctgcgggctccccattcgggccgtcttggaacacg

SEQ ID NO: 4696 - DNA, 472 bp, Gossypium hirsutum
  Clone ID: LIB3493-037-P1-M1-C7
gcaaaggctgcaaagaagggaggagagagacaggtcagagtcttgttgatgtctacaggaaaaccctaaaatctgatggtattgccgggctttatcgtggtttcaacatttcatgtgttggaatcattgtttaccgtggtctatattttggaatgtacgactctctgaagccagtgcttttgactggaagcatgcaggatagtttcttcgctagctttgctcttggttggctcatcacaaatggtgctggccttgcatcttacccaattgacactgttcgtagaagaatgatgatgacttctggtgaagctgtcaaatacaagagctcgctcgatgccttctctcatatcttgaaaaacgaaggtgccaagtctctattcaagggtgctggagctaacatccttcgtgccatttgacgtgctggtgtgctcgctggatactacaagttgcagttcattgttttcggaaagaa

SEQ ID NO: 4697 - DNA, 464 bp, Gossypium hirsutum
  Clone ID: LIB3493-037-P1-M1-C8
agaacctcaagcttggtatccatgaggactctgagaggaggactaaaattgccgaattgctccgctaccactccaccaagagtggtgatgagctgaccagcttgaaggactatgtgaccagaatgaaggagggtcagaatgatatctactacatcactggtgagagtaaaaaggcagttgagaactctcccttccttgagaagctgaagaagaagggttatgaggtcctttacatggttgatgctattgatgagtatgctgtcggacagctcaaagaatttgagggcaaaaagcttgtgtcagctaccaaggaaggtcttaaacttgatgagagtgaggatgagaagaagaagaaggaagctttgaaggaaaagtttgagggtctttgcaaggtcatcaaggatgtgctgggtgacaaggttgaaaaggttgtgggttttgatcgtgtgggtgactcaccttgc

SEQ ID NO: 4698 - DNA, 476 bp, Gossypium hirsutum
  Clone ID: LIB3493-037-P1-M1-D1
gaaagcttggagagagacccaaaaacaatgtctaaggaagtgagtgaagaaggacagggtcgtaaggactatgtggaccctccaccggcacctctgattgacatggctgaactcaagtcatggtctttttacagagccctcatagctgagttcatagccactctcctcttcctctatgtcactgttgctactgtaattggtcacaagaaacaacaagatgcatgtgatggtgttggtctcttgggtattgcatgggctttcggtggcatgatctttatccttgtttactgcactgccggtatctcaggtggacacattaaccctgcggtgacttttgggttgtttttggcccgtaaagtgtctttcattagggctgtggcttacatggtgtcacagtgcttgggtgctatatgtggagttgggttggttaaagctttcatgaagcatccatacaactcccttggtggtggtgcaaa

SEQ ID NO: 4699 - DNA, 480 bp, Gossypium hirsutum
  Clone ID: LIB3493-037-P1-M1-D10
aaaaaaaaacgaaacgaaaaagaaaaaaggccggcgggtgtttcttcttctccctctctctctctccctcacagtctccttcataattaagaaaccactgtagctgagctattgtaagagatactgagtgaatcggtgagtcagccagtgagcaaacgagcgagcgagtgagtgagtgagggagggagggaaggaaggaagaaaaaaaatgccacctacaaacatgaatccaaaccataatcaatcccaagccacagaaacgcgttcatccaccgctaacggtgaccaccaccaccaccccaacggccactccatcaccgctcaaccactccagcgccaccatacttactaccctcgttcttcctcttcctccgcctcgtttaaaggctgttgttgttgccttttcctccttttttccttcttagcacttcttgtactagccatcgtcctcatcattgtcctcgccgttaaacccaaaaa

SEQ ID NO: 4700 - DNA, 359 bp, Gossypium hirsutum
  unsure (1)..(359): unsure at all n locations; Clone ID: LIB3493-037-P1-M1-D11
ataaagtccaaaccgacccggtaaagaatactggtgagccggattgtggtggtgttggtatacttggtattgcttgggcttttggtggcatgatctttatccttgtttactgcactgctggtatctctggaggacacatcaacccggcggtgacgtttggactgttcgtggggcggaaggtgtcactgatccgagccctgttgtacatggtggctcagtgcttgggtgcaatctgtgggtgtgggttggtgaaggctttncaaatgacttactacaatagctatggaggtggtgccaacgagctccaagatgggttcaacaagggcaccggcttgggtgctgagaatattgggaccttc

SEQ ID NO: 4701 - DNA, 477 bp, Gossypium hirsutum
  Clone ID: LIB3493-037-P1-M1-D12
gcatttcatagtgttttaaatgccatcatagggttacgagatgtcttatttaaaaagccggagtcaattacagccgattcttctgacacaaggtggaaatggtttaagaattgcttaggtgctcttgatggaacccacatcaagattagggtgccaacagctgataaacctagatatcaaacccgaaaaggtgacatagcaacaaatatgctaggtgtttgtacacctgagatgcaatttgtttatgttcttcctggttgggaaggttcagttgccgatggacgggtgctccgagatgccatcagtagaagacatggactaaaagttcctcatggttgttattatctagttgatgctggatacacaaattgtgaggaatttcttgcaccatttagaggacagcgatatcatctgaacgagtggcgtcagggttatcagccaagttctccgcaagagttttttaatatgaaacatgcc

SEQ ID NO: 4702 - DNA, 478 bp, Gossypium hirsutum
  Clone ID: LIB3493-037-P1-M1-D2
ctcactgggtctctctgtgtactgtcttcccctttccgatttggcgtaaacaaagtccataacattcgtctctcagatcctttcctcttagatcatcaaatccattcctttttttcaccaaaacatgagggaaatcataagcattcatataggtcaagctggtattcaagtcggtaactcatgttgggagctttactgccttgaacatgaaatccaacccgatggaatgatgcccagtgacacctctgtaggtgtagcaaatgatgctttcaacactttctttagtgaaactggttcagggaaacatgttcctagagctgtgtttgtggatctggaacctactgtgatcgatgaagttaggactgggacttaccgacaacttttccaccctgaacagcttatttctggcaaagaagatgctgccaataactttgccagaggccattatacgattgggaaggaaattgtggatctttgg

SEQ ID NO: 4703 - DNA, 476 bp, Gossypium hirsutum
  Clone ID: LIB3493-037-P1-M1-D3
gagagcagcactgaccaacaaatgcttatgcttttaaatacgggatacgctctctccctttctcgctcattagattcttcctctttcccttctcctcccacgcgccgccttctttccatttcttccacttttgcccttcctccccctcgattcccccattcctccctcgtttcctcgagggtatccccgtcttttcgcacccaagcttcagccgccaccgcgaccatgggtgacgctcccgaagttggtatggacgctgtccaaagacgcctcatgtttgaggatgaatgtattttagtggacgagagtgataatgttgttggccatgaatcgaagtacaactgtcatttgtgggaaaagattctaactggaaagatgctgcatagagcattcagtgtatttttgtttaacacaaaatatgagttgctccttcagcaacgatctgcaacaaaggtaacattccctcgtgtctggac

SEQ ID NO: 4704 - DNA, 476 bp, Gossypium hirsutum
  Clone ID: LIB3493-037-P1-M1-D5
ggacttcctcatatgcaggaaaaagcggccaccaattgcttgatcttttctgtgcaaaattttctgcttaagcattgctgggatcactttgatgcagaactgtataacaccggtgtaagttacagctctccaacccttgcttctgctcttgccaacttaatcccagctttcactttcttgcttgctgttatcttcaggatggaaaagctagagttgaaaagcccaaagagtcagatcaaagtgttgggcaccttggtatccatttctggagcactcattatgaccctttacaagggtcctccagtactttccccaccaattcaaccgcatttacacccatctccttctaccatgttaacaacatctaacaattggctcataggtggcctcttcatcgctactgcctctttgtcactttcagcaaacatcgttggtcaggtaatttaatatgctatttcataatccacaatgctttg

SEQ ID NO: 4705 - DNA, 478 bp, Gossypium hirsutum
  Clone ID: LIB3493-037-P1-M1-D6
aaaaaagagagatggcgtctgtaataaaatctgcaatgttaatgtctgtcggtgtttttatctgtacgcttcagttcgggtgttaggttgctccaggaacagcccaatgatgaccccaaaaacatggacgctattcctcccattgatgcactcaaccctaccgagttgaatggacccggtgttggcattcacgaagatcatgttgtcccaaaaggtgctgaaattggtactcttggttttggttttgaaggtggtcctgataaatgttgttcttctggatgttccggtaattgtaatcctggtggtttcgttctaccatttcctcaaattccagaaatcccaagaattccagaaatcccacaaatcccacagatcccacaaatcccacaaattccactaatcccacagatcccacaagtcccacagatcccacaagtcccaaaaatcccactaatgccaggacagtcgggatgtgaga

SEQ ID NO: 4706 - DNA, 475 bp, Gossypium hirsutum
  Clone ID: LIB3493-037-P1-M1-D7
aatttgggcaactttgttgaaagcgatcatgagtctgcggcctcgcctacagacatgtcacttgacaaaagcacaacggattctaaagccctggtagctgtaccagcgatgagtgtggaggcgctagatgtggttccagctcataggaaatcaaagcgatctgaagttgtgcaacgtagaattcgtcgacctttctctgttgctgaagttgaagccctggttcaagctgttgagaaacttggaactggaaggtggcgtgatgttaaattaagagcttttgataacgcgaagcaccgaacttacgtagatttaaaggataagtggaaaacacttgttcatacagcgagaatatcgccgcagcaaaggcggggagaaccggtgcctcaggagctcctggacagggtcctaactgcgcatgcctactggtcacagcagcaagccaagcaacaactgaagcagcaacagcagcctgaga

SEQ ID NO: 4707 - DNA, 470 bp, Gossypium hirsutum
  Clone ID: LIB3493-037-P1-M1-D8
cagccttttcctctcagcctatgaattatggtgctatggggagtttctttgcgcagcagcaattgcttgctacaatgtctaacttacaacactttggtaatcttaatgcacaaaatgctgggattaatcatgtttccagtggatcaaatggaggatcacctatgcctgatattttccagtcaaatttgccaactcaaacagctagttctatgatgaacaattctaagaaagaggacaccagagcgtttgattttattttggaccatcttgcagctgctcgtgatccaaagaggactgtgtaaggtgggaaacatccaagtcaaaaagaataagctacaattttgttgggaaaatgttgtgcagttcgctattatagctttctaggtactttgtcattttctatggtatttgtttttcagttactttcttgttggaatggatttgtagagtttctgtaccgcctgtttttc

SEQ ID NO: 4708 - DNA, 386 bp, Gossypium hirsutum
  Clone ID: LIB3493-037-P1-M1-D9
cggacgcgtgggcgaggatatgttgcttcgaactcagaggatgatcctgccaaggaggcagctaatttcacttcccaagtcatcatcatgaaccacccagggcagattggaaatggatatgcgcctgtccttgattgccacacgtcccacattgcggtcaagtttgcagagttggtgaccaagattgacaggcgttctggtaaggagcttgagaaggaacccaagttcttgaagaatggtgatgcaggatttgttaagatgattcccaccaaacccatggttgtggaaaccttctctgagtatcccccactgggtcgttttgctgtgagggacatgaggcagactgttgctgacggcgttatcaagagcgttgagaagaaagatcc

SEQ ID NO: 4709 - DNA, 477 bp, Gossypium hirsutum
  Clone ID: LIB3493-037-P1-M1-E1
cggacgcgtgggtaaagctacaatgcctactggtggcgtaggtgccataaaggtgctttcatctggttctcatcagggggagaaagagtttcacacagaggtttgtctactaggaaggctgcatcatcggaatcttgtgaacttgataggatattgcgtggataaaggacaatacatgttaatttatgagttcatgagcaacggaagcttggcaaccatactatatgatgaggaggagcagggtctgagttgggacgaaagacttcaaattgctcttgatgtttcacatggcgtagaatatcttcatgaaggggcagtccctccggtaatacatcgtgatttgaagtcagctaatatattgttggaccaatcaatgagagccaaggtcgctgattttgggttgtcaaaggaggaggcttttgatggccgaaactctggcattaaaggtacatacgggtatatagaccctgagtatat

SEQ ID NO: 4710 - DNA, 233 bp, Gossypium hirsutum
  unsure (1)..(233): unsure at all n locations; Clone ID: LIB3493-037-P1-M1-E10
gaaaaaaactaaaaaaaatctctctnaaanaaagagaggggaanggagctctgggctttngcctccnttngtcacacttcgcccacgcgcccacacgccgncctatgaccaccgtatactgtagccagggttcgaaaaacctctcctttttcgtgccatccgtcaggtatcctaatgatctcggcgttaacagtggtaccaacgctagaggggaggcctgagatcgcggtgct

SEQ ID NO: 4711 - DNA, 136 bp, Gossypium hirsutum
  Clone ID: LIB3493-037-P1-M1-E12
agaaataccactacttttaacgttattttacttgttaggtgaatcaaaagcggggcgcggcccctcttttttgacccaatgccgacttcggccaatctatccattcagaaaacattttcatttgtagagtttggct

SEQ ID NO: 4712 - DNA, 469 bp, Gossypium hirsutum
  unsure (1)..(469): unsure at all n locations; Clone ID: LIB3493-037-P1-M1-E2
cggacgcgtgggttcagttaaagtaccgacagtggtgtgtgacggtgtcanaggagctgacgtgtcattaccggcgacgaactatttgattccggtcgatagcagtgggacattttgctttgctttcgccggtaccatgagtggtttgtccataattggaaatatccagcaacaaggttttctggttgcttatgatttagcgggctctcggatcgggtttaagcccaatggatgcgcttaaaaaatggcggttgttttttcttacccctatggtaattggtaagtgaaaaagctctttccccgcctgtttttttttattttttatgctggtttttttagagggtaaaaaaggaagaacaaaaatatctttgttgaatttgagtgtaagaaaaaaaagtaggggaatcattgtcgtttggctgttttccacgtgttgatgtttggattttaaatatattagggtaaacta

SEQ ID NO: 4713 - DNA, 477 bp, Gossypium hirsutum
  Clone ID: LIB3493-037-P1-M1-E3
gtgaaaacttaccctaaaataccaggtggggagccaagagagcgatccaagcacaggttcggctgtattgctaccattgaagaacttgatagccgccactattcaagctgaagttttggtttgtgggggtgctccaaaaggatcatttgtccaagcattacaaggtaagttcgttaaagccttggacacttgcgccaggatctcaataaccgacccgaaaccaaaatgggtcttggaaactatgcctttagctagagtcatgggcgacatggtattgcttccaaacggcaaagttttggtcatcaacggagcacgttccgggtcagcaggatgggacttagggagggacccggtcttaaatccggtgttatacatgcctgataatgaaatcgagtcacgattcaagatactaaacccaacaaatatccctcggatgtaccatttcacagcagtattacttcgtgatggaagagtttt

SEQ ID NO: 4714 - DNA, 414 bp, Gossypium hirsutum
  unsure (1)..(414): unsure at all n locations; Clone ID: LIB3493-037-P1-M1-E4
ctgctttctttcaaagctcacggattttctctctttggctcgagagctcaaatagctggcgaatcanatggccatgcaggaaggaaatcctgcgggtactcccagtgctcaagttgttggaaatgcttttgtggagcagtattaccatattcttcaccaatcaccgaacctcgtgcatagattttatcaagattcgagttgtttaagtcggccagatatgtatggcaacatgacaactgtgacaaccatgcaggcaatcaatgagaaggtactatcgctgaattatgaggactatacagcagagataaaaactgcagatgctcaagactcttttgagaaaggggtcattgtactggtaactggatgcttaaccggaaaagacaatgtgagaaggaaattcacacaaaccttttt

SEQ ID NO: 4715 - DNA, 225 bp, Gossypium hirsutum
  unsure (1)..(225): unsure at all n locations; Clone ID: LIB3493-037-P1-M1-E5
gcctggcagttatacaaagctcaagaggagcttatcaatgtactaagcaatttggtgtgaagctaacgatgttccatggtcgtggtggaactgttggaagaggtggtggnncnacnnannttgnttattatgtgagggannagnacaatttaggggtaatttggggttacagtttaaggtgaagttattgagtaattgttaggagaggaagagttgtgttttaga

SEQ ID NO: 4716 - DNA, 424 bp, Gossypium hirsutum
  Clone ID: LIB3493-037-P1-M1-E6
gtgcatggaagctttgtcaaagcatgcaaatataaaagcagtgattacttcaacaggtaggtattcttccgacactttcctctttcttgatcaatcaagcagcatatacatcgtacatgatgaacttgaccgtaagggtcttattaagtagttttgttgttagtaatataattaataggatgcgtatatgtattggttaaagtttggattgagttggagaaagagaacaaggagttctttgaggcatacacaaggggaagccatgagagagccactgaaatagagaaaagacaaaggattcagaggagtctccatgcttacataagggacaacaatggcaacgatcaactccactactaaatatcatcatattgttccaaactatttgggcttcctttttggtggtgaaagggtattggaaaag

SEQ ID NO: 4717 - DNA, 389 bp, Gossypium hirsutum
  Clone ID: LIB3493-037-P1-M1-E7
tggatcttcatttcatcaccattttagctctcgttatgttccttataaccccaaggggtgtatatggtgcttccttcacattcatcaaccggtgtgattacactgtatggcctggtatattagcaaatgcaggtactcctagtctgggaaccaccggattcgagctcccaaaagactcttctcgttcattccaagctccgacgggttggtccggtcgtttttggggtcgaacggggtgtaaattcgacggatccggctccggaacttgtctcaccggcgattgcgggtcgggtcaagtagaatgcaacggactcggtgctgctccgccggtgactctagctgagttcactcttggaaccaccggtggtcaagatttttacgatgtccgt

SEQ ID NO: 4718 - DNA, 474 bp, Gossypium hirsutum
  Clone ID: LIB3493-037-P1-M1-E8
cgacattccccagccatttgctgtcccgaaggtgctggcggattctgagaactatgctgagtcccggcttctgatcaaattaccgaaacaagtcaatccagaacataagaagaagaagatcaagttatcggtttcagctgcagcagccattgctgataatagtcaaaatccaactggacaagctgttacgaaatgtatgcactgtgagataactaagacacctcaatggagggcagggccaatgggtccgaaaaccctttgcaatgcctgtggtgtccgatacaagtctggcaggctcttccccgagtaccggcctgctgcaagtccgacatttgttccgtcagtacactcaaattctcacaagaaagtgctggagatgagaaccaaaagttgtgcactagcgcccaccacaacaatggttgccaacaatttaccagagttgattccaaataaaagcaacccagcattggatta

SEQ ID NO: 4719 - DNA, 445 bp, Gossypium hirsutum
  unsure (1)..(445): unsure at all n locations; Clone ID: LIB3493-037-P1-M1-E9
ggcattgaaccgcccaaaaggccgagtagttgggagcgcagtaaaaccaaatttggctgctcgcctgctgaacttaccaagattcaaattctcctctgtaagctctcatccagcaatcctgaagaccaaagaatggctgcaggtgaaatccgtcttcttgctaaacgcaatgcagataaccgtgtagccattgctgaagcgggggctatacctctccttgtaaaaatcctttcaacacctgactcacgcacccaagaacatgctgtgacagcacttcttaacctttctatttgtgaagataacaaaggaagtatcatatcctctggtgcagttcctggtattggccaggtgcttaagaaggggagcatggaagctagagaaaatgcancatccaccggtttcagcctttcagtagtggatgaaaaataagtggccattggcgcct

SEQ ID NO: 4720 - DNA, 474 bp, Gossypium hirsutum
  Clone ID: LIB3493-037-P1-M1-F1
gccgccgctagtgaaaacgggaagctagcaaaggaatacatggagaaaggagaattagtccctaatgaaatagttgttatgatggtcaaggagcgtctgctgcaacctgattctcaacaaaggggttggcttttagatggctatcctaggagctcatcccaggcagctgctcttgaggattatgggatccgtcctgatcttttcattttgttggatgtttctgaagacattcttgttgagagagtggttggacgaaggttagaccctcttacggggaagatataccacttgaaatattcacccccggagaacgatgaaattgcatccaggcttacacaacgatttgatgatactgaagaaaaggtgaagttgcggctacgcacacatcatcaaaatgtggatgctgtgctctctgtatataaagatatcacagtcaaggttaatggaaatgaggccaaggaacatgtgtttgca

SEQ ID NO: 4721 - DNA, 393 bp, Gossypium hirsutum
  Clone ID: LIB3493-037-P1-M1-F10
tcagacgcgtgggtggaacttgacttccccccagttaagcatcctcaccttctcacctccttcccatcctattttcctaatcccccagttttctttcttatttttcttaatttatcatgaaactaatcaataggcttagtcccaaacatctctttcgatctaataaaaagggtccatccactgtctccaagttcgatccttcgtcgtatactacttccggttctgcttcatcgtcttcgtcagaatccgtttcctcagttcacaaaggaaatcagtaccctttagcgccaacagttggaaccggaacacccaccagtgttttgcccgaaacatcggttgactggttagatttttctgctaatttttatgtagaactttgccaagcttttaaaa

SEQ ID NO: 4722 - DNA, 347 bp, Gossypium hirsutum
  Clone ID: LIB3493-037-P1-M1-F11
ggtttacttaccttttctcttgattttcaacgtgattgcatattttccctcttgttcacatgcacaaaatgcagaccttattctgccattggaggctgtaaaccttggtaactggcttgttactgaaggatggatgaaaccttctcgttttgatggcatcattaacaaagatcttttggatggaacccaagttcagtttcgttcaacaaagctaaacaagtatttgtgtgctgaaaatggcggtggaaccgtcgttgtagccaaccgtccctcaccttctggttgggaaaccttcaggttatggagggtgagtgaatcatgctttaacttgagagtgttcaacaagc

SEQ ID NO: 4723 - DNA, 367 bp, Gossypium hirsutum
  Clone ID: LIB3493-037-P1-M1-F12
tggtttacttaccttttacataaaaaacctcatgaatggatattttccctgttgtgcacatccacaaaatgcataccttattctgccattggaagctgtaaaccttggtaactggcttgttactgaaagatggatgaaaccttctcgttttgatggcatcattaacaaatatcttttaaatggaacccaagttcagtttcgttcaacaaaactaaacaagtatttttatgctgaaaattgcgattgaaccatctttgtaaccaaccgaaccttaccttttggttgtgaaaccttcaggttattgaaggtgaatgaatcatgctttaacttgaaagttttcaacaaacaatatttttggaaaattaaa

SEQ ID NO: 4724 - DNA, 477 bp, Gossypium hirsutum
  Clone ID: LIB3493-037-P1-M1-F2
actggaacatttttggggtctttgtgggagtctagaaccaatgtggcagtaacactccttgaggcaggcctggcaaagctacaaacttcatttggtactgacaggattgccgatgcgcatcttcttgaacaggctgagcaatctgctaagaaccagaaactaaaaatttgggagaactatgtggaaggagaggaaattaccaacggaccagccgttgttgataacaaacaaaaggaagtgctaaaggttgttgttacagaagtagtagatggtggaaaattttatgtccagacagtgggagatcagagattctcatcaattcagaaacacctggcatctttaagcattcaagaagctcctgtgattggggcttttaatcccaggaagggtgacattgtccttgctcagtttagtatggataattcctggaatcgtgcactgattgtaaatgcacctcgaggaggaattcaatctctg

SEQ ID NO: 4725 - DNA, 477 bp, Gossypium hirsutum
  Clone ID: LIB3493-037-P1-M1-F3
aagccatcctctctgctgctcaatctagccctgttgctgtttgatggggatatgcacggtttgtgaatataagagacgctaggggagccactcctttgcacttagcagctcgtcaaagacggcccgaatgcgttcatatcctgttagataacggtgctcttgtttgtgcttcaaccggtggatacggttgtccaggaagcacccctcttcatttggctgctagaggtggatctctcgattgtatacgtaagttgttggcgtggggtgcggatcgtcttcaaagagatgcaacagggagaataccgtatattgttgctcttaagtacaaacatggagcatgtgccgctctgttaaatccgtcatctgccgaacctcttgtctggccagcacctttaaagttcattagtgagctcaatgatgaggcaaaggtactattagaacaggccttaatggatgcaaacagggaaagggaaaaga

SEQ ID NO: 4726 - DNA, 475 bp, Gossypium hirsutum
  Clone ID: LIB3493-037-P1-M1-F4
gttctaaatcccttagggttccttcactccattgccagttggccaccactaatggcgacatccatagcagctcgcatctccaggaaggccgcggcctctgctttctccgctcaccgtcacgtaatctcatcccgttgtttcgccacggagtcggcgaaaacgatctcgccgtcgtcggatcgagtcaagtgggactacaggggccaaaggaagataatccctctcggacagtgggtccctaaggtcgccgtcgacgcttatgtggcacctaatgtcgtcttggccggtcaagtaaccgtctacgacggagcgtcggtgtggaacggctgcgtcctacgtggagatctcaacaagatcaccgttggattctgctctaatgtccaggaacgctgcgtcattcacgccgcttggtcctcacctaccggacttccagctgagacatcaattgagaggtttgtgacaattggtgcataca

SEQ ID NO: 4727 - DNA, 462 bp, Gossypium hirsutum
  Clone ID: LIB3493-037-P1-M1-F5
caactgtccggatggctactacaatgatctagctaccgcttctcttaacaacgaatgacgatgccgttcgaaacattttctcgagcaacactccttctgaattccaatatacctcaatcttgatctttttcgcactttattgtatcttgggactcattactttcggcattgcagttccttcgggtctcttcctccctatcatcctaatgggctcgggttacggtcgacttcttagtatgcttttaggatcatatacgaacttagatcaagggctttatgctgtcctcggtgcagcctctttgatggctggctcgatgagaatgaccgtatcggtttgtgtgatcttccttgagcttacaaataaccttcttttgttaccgataacaatgatagtccttctcattgcgaaaaccgtcggtgacaggtttaatcctagcatctacgaggatatacttgaactta

SEQ ID NO: 4728 - DNA, 482 bp, Gossypium hirsutum
  Clone ID: LIB3493-037-P1-M1-F6
cactttctgatattcattgtgacataaaaaacctgataactgagcttgacctccctgtgactgagtgggatgaaaaatggatggatgtgtacctggatatcagtgtgaagttgcttgatattagtattgcttttacctctgagcttacacggcttaaccaaggccatctcttacttcaatatggtctgcacaagttggagtcggattccccagaactgttcagtcgggcctcttcctcacttaatagctggaaacagcacattggctccaaaaatcccagagttgaaacttgtcgacctatcttggacaaccttgttgagtcactaaacttgcctaaggtaaaaaactcttccaaaggaaaagtattgatgcgtgctatgtgtggagctaaggtggcaactacttatatatgtagtgtctttgctgcagctctctctggttcttccaagaatttattggacttaactgttcctaacacgcta

SEQ ID NO: 4729 - DNA, 475 bp, Gossypium hirsutum
  Clone ID: LIB3493-037-P1-M1-F7
ctcaaaacagtgatcaatgagaaaagggcaagtgaatgtgttctttttgttactgtttttgagtctctcttcagcttctgatcagaaatggaggaaagcaatgatgtcagcttacaacggttcttcttcttcttcttccatgatgatgaatagagttgggtcctccatcctgttcccaattcatggaaatgtgtatccaacagggtactataatgttaccatctatataggtcaccctcccaagccttactttcttgatcttgatactggaagcgacctcacatggctccaatgcaacgctccatgcgtccattgtattgaggcacctcatccgctttaccaacccagcaatgacctagttgcctgtagacatccgctatgtgcagcattgcatccgcctgactacaaatgtgaaagtccagaccaatgtgactatgaggttgagtatgcagatggtggttcatcccttggagtc

SEQ ID NO: 4730 - DNA, 455 bp, Gossypium hirsutum
  Clone ID: LIB3493-037-P1-M1-F8
gtcttcttcattctcactctctctccactgaactcttgctaaacggtatcgttttagtcagtctttcatcaatggcgaaagaaccggttcgcgtcctcgttactggagctgcaggacaaatcgggtatgctcttgtacccatgattgctaggggagtcatgttgggtgctgaccagcccgtgatccttcacatgcttgatatcccacctgctgcggaggctttgaatggtgtcaaaatggagttggtggatgctgcttttcctcttctaaagggtgttgttgctacaactgatgttgttgaggcatgcactggagtcaatgttgctgtcatggttggtggtttcccaaggaaggaaggaatggagaggaaagatgttatgtcaaagaatgtgtctatttacaagtctcaagcttctgccttggaacagcatgcagctcctaactgcaaggttttg

SEQ ID NO: 4731 - DNA, 469 bp, Gossypium hirsutum
  Clone ID: LIB3493-037-P1-M1-F9
aaatgaaagaaagtcgatgaatcgatcgtggaagaaagcttttgtatgcaatctatctaagcataacaaaacccattccttgtgtttccagtgaatgggtagatggagagcagctgcttcgcttctcttcacccacttaaccaaaacccccttcccttctcttcctcccaaacctcttttcctatccctttcttcaagccctgctttctgttttctccttgcaagaccattctcagctctcctatctcaacttcccatttatcctagcgattctgaaaatgggtctccttgtttttcccaacaaaatcatgggtttgtttcacaagaagaagaagaggaaattggcaagattcccatcaaagcttatttcctttgtaccagtatcgatttgaagagtatgcaagctgagaatttaagcaacatcgtacctccttcttctcgttcatcaaactatattgctctcagatat

SEQ ID NO: 4732 - DNA, 476 bp, Gossypium hirsutum
  Clone ID: LIB3493-037-P1-M1-G1
cccatctcgcctcacttccctttctttccttctctttgcctggttcctctgtttttcattgtgttcttttggtcatggctaagcagatggatgatgctgagttttggcttccacccaagtttttaatggatgatgactttgttttggagaaagagaagcttcagagaagcaatattggcgaaaacaaccctaagtcgttggtttcggttcatggtttcccaactgagttcccctacgagttcgactattcctctgctctcggctctcctgttgagtccgttgttgggtctatcgaaactgaaagcagtgacgaggatgagtttcttgctgggctgactcgtcgacttcctctctcaattactcataaactcaccgttcctagcttttcttgggacaaaaatgagaaaactggagctttggcgagttcaccccagtcaactctgagtgggttcgtaagctggtcagcttcaagcaat

SEQ ID NO: 4733 - DNA, 245 bp, Gossypium hirsutum
  Clone ID: LIB3493-037-P1-M1-G10
agaaagtaaaactccgacgccatgtccagctcggatcgcaacaagctcatttccgaagccgacaaactaacaaggctaagtcttacaaggtggagtgcagattggaaaagtgctactcttttatatgaacaagctgcaaatggatttcgagtttcaaaggattatgagaaagcaaagttggcattcgagaaagcttccaaaggacaagaaatgctagcttcttcctgggatgctgctaaacacat

SEQ ID NO: 4734 - DNA, 332 bp, Gossypium hirsutum
  unsure (1)..(332): unsure at all n locations; Clone ID: LIB3493-037-P1-M1-G11
cgtagatgagcctaactttgatgtgcaagagtgcaaagccgggaatctgaatagggtcatccagcaaccatcttttcctgttaatttggatttcttacgaaagaggaaaccgtctgatgatataaacgtcgaacacaggatctacacttgtgagttcctcaaatgtccttatagtgaactccaattgggttttcttgaccggactgccaaggacaatcatcaactaacttgtccacatagaaactcgtctgcagagttcggtggttccgaattntaacataaatgatgtgaaaccggcaattttccttccaccatttgcccaaccgaagccg

SEQ ID NO: 4735 - DNA, 446 bp, Gossypium hirsutum
  Clone ID: LIB3493-037-P1-M1-G12
cagacgcgtgggcccgggggtgccccatgcggggaagagaccgttcgtgaatatatggatagggtctgcatcttttatctgtacttacttgaatcaacccttacatgtggcagcttacatatcaatacaattggcatgacaaatcaatgatatttgaacattaccattggaagaaagcgaaggctaagaaccaaccatacaaatttaagtggaatgagtacatggacaaggatcacagggactcgtattatttcaactggcctgtctacttcccatagtgtttctttcatgtaggcatgctctttgataagtagttcagacaaaaaggactttacctgcctaaaaatttatgttatctttattgctttgtgccttttttgcgacttattattgtggtttaactctaccctatcggattatatggggaatggtatatgggtcaaggt

SEQ ID NO: 4736 - DNA, 460 bp, Gossypium hirsutum
  Clone ID: LIB3493-037-P1-M1-G3
cccacgcgtccgcataaaccctataccttgtataatctgaagcggactttgaagaagaaataagaaacattgcttttgccctgtcattgttcacttgccaagtgtgatattttacagtactgcttaatataaatttgtgcaaattagctactagttctgtgtttgtttatgtcaagtcgtcactctattggaaggtagagcagtagacctctgaatcttcattctatccatcaattatcacaaaagttgaatgtttttcaacattgtttaaattcataaatgaaactgaaaatgttgatatatgttgcttgaattcaaaatgctaatgttcagttgcattgtaagataaacttcctggtttacttgtcagcattctttcttttacaattaaatggattgtccttgtttttccaattattgcttctttcttttggctgaatggttttcttttttttctgat

SEQ ID NO: 4737 - DNA, 477 bp, Gossypium hirsutum
  Clone ID: LIB3493-037-P1-M1-G4
gaaacttgtccctgccactccttttgattatgggagtggtcatgttaatccgagagctggtttggatcccggactcatctttgatgcaggttatgaggattatgttggattcttgtgcaccacacctggtattgacattcacgagataaagaagtacacaaactccccctgcaatagcaccattggccgcccttcgaatctcaacaccccatcaatcacaatctctcatcttgtcgggactcaaaccgtcactcgcaccgttacaaacgttgctgaggaagaaacctacgtcatcacagctagaatgcatccatccgttgccatcgaaaccaggccttcagccatgactttgagacccggcgcatcaagaaagttctctgtcacgcttaccgctcgatcagtaaccggaagctactgctttggagagatcacaatgaaaggtagcagagggcacaagggtactataccagtggtggc

SEQ ID NO: 4738 - DNA, 295 bp, Gossypium hirsutum
  unsure (1)..(295): unsure at all n locations; Clone ID: LIB3493-037-P1-M1-G5
gtggctctatcacagcatcgtggagtcaaagaagtaagtgaagggatgtcaaagactagtggtatcccantttcagagatttgcgagcaccggtttttgttgtacaacaaggatgctacacagcacatctttgaagtatctgctggtcttgactctcttgttcttggagaaggtcaaatccttgcacaagttaaacaagttgtcaaagttgggcaaggtgttgttggctttggaaggaacattaatgggcttgtcaagcacgcaattacttgttggaaacgtgttataacttaga

SEQ ID NO: 4739 - DNA, 304 bp, Gossypium hirsutum
  Clone ID: LIB3493-037-P1-M1-G6
cccacgcgtccgcttcaagaaaaacgaggcatctgagtggggggacaatgataaacatgtggccaatgattttgttgagctggaaaagagcaatgtactgttaataggtcccactagttcagatgacaatgcccagagatgctttacatcttggtggagtggaacatcgggagttatataatgcctatggatattacttccacatggcaacagctgaaggccttctaaagcatagggatggtaaggtcggaccttttgtctggtccagagcattctttgctggaagtcaaaggggtggagcagg

SEQ ID NO: 4740 - DNA, 434 bp, Gossypium hirsutum
  Clone ID: LIB3493-037-P1-M1-G7
cgcattttagagctgggaattgtttatatgtgtgtagggaagtacaaagaagctaaggaagagtttttgttggctttggaagcagctgaggcaggtgggaatcaatggggttatttgcttcctcaaatttatgtcaatcttgggattgctctcgaaggagaaggtatggttttaaatgcttgtgagtattatagagaggctgccatcctttgtcccacgcattttagagctttgaaacttttgggtagtgctcttttcggggttggggagtatagggcagctgcaaaggctttagaagaggctattttcatgaaaccagattatgctgatgcacattgtgatttgggatcagctttgcatgctctgggtgaagatgagagggcaattggggttttccagaaagctattgaattgaaacctggtcatgatgatgc

SEQ ID NO: 4741 - DNA, 408 bp, Gossypium hirsutum
  Clone ID: LIB3493-037-P1-M1-G8
cccacgcgtccgagttcttacagccgtccaagtgggtgatgtcatccgagctcagcgtaagggtgctggttccttgttcaaggcccacacccaccaccgcaagggtcccgcccgttttcgcagcctcgacttcggtgaacgaaacggctacctcaaaggcgtcgtcaccgatgttatccacgacccaggccgcggagcgcccttagctcgcgtcgtgttccgtcacccgttccgttacaagaagcagaaggaactgttcgtcgctgctgagggtatgtacaccggacagttcgtgtactgtggtaagaaggccacccttattgtcggaaacgtgttgcctcttagatctatcctctaaggagctgtcgtttgctacgttgaacaccacgttggtgatcggggggtttt

SEQ ID NO: 4742 - DNA, 373 bp, Gossypium hirsutum
  Clone ID: LIB3493-037-P1-M1-G9
cattcgtggtcttattcctaacctggcacaacgacgggatatgcctgcagcctttgttcaaatgtactgtcgcatagctgcacataaattctctttcttttgtgatcctcatagacgaggaaaggcctgcataaaaaaggtgctgcttagtaactgtctccaggaattaatggaactacatcaggaaagtgaggaagaagtcactgacactgagcaagctgaaaattggttttccttgacttctgcacaacgtatatgtgatatgtttcttgccctcgataaagatatgaatggaacactgagcaagcaggaacttaaagaatatgcggatggaactctaactgaaattttcatctaaagaatttttgattat

SEQ ID NO: 4743 - DNA, 479 bp, Gossypium hirsutum
  Clone ID: LIB3493-037-P1-M1-H1
cttgatacttgcttaatttgctcagcttttcatgtttgctttgtacttcagctctctgaagccacgtctcatttacccgtttcgcttcgggtaaattttggtgtataaatttggaaaaaagaaaaagttagaacaaatttggggattaatggaagttgatcttgaacccaaggtgttagacacttcatctatgacggagaagggatatgaagaatttgggtgttcacactatagaagaagatgcaagatcagggcaccttgttgtgatgagatatttgattgcagacactgccataatgatgccaagaactcaattgaaattgatccttttgatcgtcatgaggttcctcgccatgatataaaaagggttatttgttccttgtgtgacagagaacaagatgttcaacagcattgcattaactgtggggtctgcatgggaaagtatttctgttcaaaatgcaactttttcgatgatgatg

SEQ ID NO: 4744 - DNA, 452 bp, Gossypium hirsutum
  Clone ID: LIB3493-037-P1-M1-H10
gccgagaagcccctgctgttttcaagtaccaggggacgtactacatgataacatcggcttgcactggatgggcaccgaatgaagcaaaggtagatgcagccgagtcgatcatgggaccttgggagacgattggtgacccgtgcatcggagggaaggaaatgtttcgacttacaacatttttgtcacagagtacatttgtgcttcctctgctaggccttccaggttcatatatttttatggcagatcgatggaatccggctgaattaaacgattcgaggtatgtatggttacctttagcgatcggtggccggtctcttgagtcgaatagttctggatctcaatcaccatggccaagagtgtcaatacattggcataagaagtggagacttcccttgagctggaggctatagaaattaatatgaatgcttcgttagtttttttttttttttctt

SEQ ID NO: 4745 - DNA, 457 bp, Gossypium hirsutum
  Clone ID: LIB3493-037-P1-M1-H11
cgccatgtccagctccgatcccaacaagctcatctccggagccgacaaactaacaaagctaagtcttacaaggtggagtgcagattggaaaagtgctactcttttatatgaacaagctgcaaatggatttcgagtttcaaaggattatgagaaagcaaagttggcattcgagaaagcttccaaaggacaagagatgctagcttctccctgggatgctgctaaacacatggagtctgctgctgctttagcaaaggaactacgcaactggactgaggttatcgacttttacagaagggcatctgagctgtacatgcagtgtgacagaccacaacctgcatctgattcacttgccaaggctgcccgtgctttggaggatgctttgcctgatgatgctgttcagctatataccgatgcttgtgttattcttggagatgatggaaaggaacagatgggcttt

SEQ ID NO: 4746 - DNA, 480 bp, Gossypium hirsutum
  Clone ID: LIB3493-037-P1-M1-H12
caaaaggtagcaaggtgaaatatgaacttgacaagaaaactggtctgatcaaggttgatcgtgtgctttactcatcagttgtgtatcctcacaactacggattcatccctcgcactctttgtgaagacaatgatcccatggatgtcttgatcattatgcaggaaccagttattccaggatgctttcttcgcgctaaagctataggtctgatgcctatgattgatcagggtgagaaagatgacaagattattgctgtctgtgccgatgatcctgagtatcgtcactacaatgatatcaaggaactcccacctcaccgcctggctgaaatccgtcgcttctttgaagactataagaagaatgagaacaaagaagttgctgttaatgactttctgcctgcctctactgcatacgaggcaatccaacactccttgaatctctacgcggactacatagtggagagcttgaggcggtaattgtcgg

SEQ ID NO: 4747 - DNA, 472 bp, Gossypium hirsutum
  Clone ID: LIB3493-037-P1-M1-H2
ggatcagagatcaaatatgaatctgcatgtgcatcagaggatggaaattcatcggagagttttcagtctcgtacctggcaaaagtccccaacttctgaaggaactgctggacatgcaagaactcctgcttcagatcaatctatttctagaaatatctctgttgatgtgaacttagagcaggtgaaggagttggtagaatcccctgtggcttcttatccgtctccctcaaagttatcacattctttgccatcagcttcctcgttggcaacatcccctttgtcttcccaaagtcatgtgcatcctactggttcaacaataacgaggtggcctctcagatctcctggacatcatctattgcgacaagtatctgataaccgaattctaggactaaagtcacctaatggatactcagttggtgaggaaaggcttgtaatgccttcatggagcaatgaatcaactgggggctctcggg

SEQ ID NO: 4748 - DNA, 457 bp, Gossypium hirsutum
  Clone ID: LIB3493-037-P1-M1-H3
cgcctttgctttagttctttctacacacattctctgcctgccggcccttatccactctttcccaaaaacccagaaaccaaaacaaagcctttaccttgtttattgttttacttatcatttttgttcatcaaactacaacaaaaagaaatggcctctgcaaatgctctttcttcagcttctattctttgctctcccaacaaggggagtttaaggaggaagggaaatcagagacagaaccaaagggtaaattataggcaaggaaacaaccggtttggtgtgaaggcttgtgctaaagaaattgcttttgaccagagttcaagagctgcaatgcaggctggcattgataagttagctgatgctgttggccttacacttggtcctagaaggaggaatgttgtgttggatgaatttgaagtccgaaagtcgttaacgatggggtgacaatagctagagctat

SEQ ID NO: 4749 - DNA, 433 bp, Gossypium hirsutum
  unsure (1)..(433): unsure at all n locations; Clone ID: LIB3493-037-P1-M1-H4
cggacgcgtgggcgggcagctcgtaaacctaagggaagtattgggtgcgttttcaatgaacaacgtgactaggatgttactagggaggcaatatttcggggccgtatccgccggcccaagtgaagccatggagttcatgcacataacacatgaattgttttggctcttaggtgtgatctatttgggggattatttgcccatttggaggtgggtggatccttatggatgtgagaaaaggatgagggaagtagagaaaagagtggatgatttncataaaaggatcattgaagaacataggagggcaagggaattgaaaaacaaagaatatggaaaggatgatgattatggtgaagaaatggattttgttgatgttttattatnattacntggtgaaggtggaaatgtttattttgggtgattttggtatttaaag

SEQ ID NO: 4750 - DNA, 482 bp, Gossypium hirsutum
  Clone ID: LIB3493-037-P1-M1-H5
gcgctctcttgacattgagcgacccacttacaccaatcttaaccgtcttgtctcccaggtgatctcctctttgactgcttcacttaggttcgatggtgccttgaacgtggatgtaacagaattccagaccaacttggtcccttacccaagaatacacttcatgctttcttcatacgctccagtcatctctgctgagaaggcttaccatgagcagctatcagttgctgaaatcaccaatagtgcctttgagccctcatctatgatggccaagtgtgatcctcgccatggcaagtatatggcttgctgtttgatgtaccgtggtgatgttgtgcccaaggatgtcaatgctgctgttgccaccatcaagaccaagagaactattcagtttgttgactggtgcccaactggattcaagtgtggtatcaactaccagccacccactgtcgttcctggtggtgatcttgctaaggtccagagagccg

SEQ ID NO: 4751 - DNA, 413 bp, Gossypium hirsutum
  Clone ID: LIB3493-037-P1-M1-H6
ctataaggtcagcacggcgatatatgcacctgaggagaaggctcgctttgaaagagcgaccactatgcttcactcatccagagcgtatcccttcctttgtcgcccttaattaccgtcttcttatcgggaaccatcctgggaagcgcgttagcgtcatccgcactaacgcaattagccatgaacatggacatcaaagagatcccatcacccaaagagtgatggatcctgaaaacagcgcatttgtgcgccgtcaagacgtgtaattcccacaagggtttgtgcgtactcaaaggactgttcactgacaaatccgtcacgtactgattcactgccgcttcatcgtcttcttcggtgggggtgggaccttgtgtttggtcgatgaaattggccgatttattgagccggttgttgag

SEQ ID NO: 4752 - DNA, 450 bp, Gossypium hirsutum
  Clone ID: LIB3493-037-P1-M1-H7
gcagtatgtgtgggagtctcaagccggtggatcgcttcaccgtcacgagggatacttccggggagaaccttggcaggggtactaaaattacccttttcttaaaagaggatcaacttgagtatcttgaggagcggcgtttaaaggacttgattaagaagcactctgagttcattagctatcctatttctctttggattgagaagacaaccgagaaggagatttctgatgatgaggacgaggaggataagaaggatgaggaagggaaagttgaggatgtagatgaggaaaaggagaaggaagagaagaaaaagaagaagattaaggaggtctcgcatgagtggtcattggtgaataagcaaaagccgatttggatgaggaaaccagaggagataaccaaggaagaatatgctgcattctacaagagccttacaaatgattgggaagagcatt

SEQ ID NO: 4753 - DNA, 473 bp, Gossypium hirsutum
  Clone ID: LIB3493-037-P1-M1-H8
cgattccctccgaatccagtttttaagccattttgtttgtattgaaacagttgaatttctaagatttcattgttttgttatatctagggttggggttttgaaatcattgagagattcattgaacttcactatatggcattgatcgactgatcaaccgtagctaaaattgaatcaccgccttttctccgtttttcatatttgagtgaaggttgttgtatcaatggcttccactaaagaaagtgataacacttccgatactccttcctcgcccaaaaacgtgtacaaggatccagacgatgggcggcaacgattcttactcgaattggagttcgtgcagtgccttgccaaccctacttatatccactatttggctcaaaaccgctattttgaagatgaggcattcattggatacttgaaatatcttcaatactggcaacgaccggagtacataaaatttatcatgtatcctcatt

SEQ ID NO: 4754 - DNA, 437 bp, Gossypium hirsutum
  Clone ID: LIB3493-037-P1-M1-H9
gtacaaagcaggaatatcttccgagcggtcatcgaggggatcaaaacacccgaatcataattggaatacatgcaatgggaaggatggaaagcttatggggagaagattgctatgcgttcaagccagaaagatggattggtgaagatgggaagattaaacgagagtcgccaactaaatttagcgcattccttgcggggccaaggatttgtccagggaaagaggtgtcgtttctcttgatgaaggctaccgcaacagccatcattcataactacaacgttcatgtggtggaagggcagaatattggtcccaaaaacagtgtggtttatcagatgaagaaggggttaatggttaggattaagaagagatggagttaaagaatttgcagggttaaagtggtaattaagaagtgttaccatatttatacttatataatctta

SEQ ID NO: 4755 - DNA, 444 bp, Gossypium hirsutum
  Clone ID: LIB3493-038-P1-M1-A10
cccacgcgtccggattgccttcttttcgatcttgatgataccctttatccccttagttctggtatttcaaaagaatgtggaaagaacattaaagactacatggttgaaaagctggggatagaaaaggacaaaatcgttgaactgtccaacctgttgtataagaattatgggacaacaatggctggcctcagggcaattggttatgactttgactatgatgaataccacagttacgttcatggaagactcccttatgacaacttaaaaccagatcctcaattgagaagtctattgctgaccttgcctctaaggaaaattctcttcacaaatgcagacaaggtccatgcagctaaagctctgattaaactcggactagaagactgtttccaagggataatctgctttgagacactcaatcctacccataagaatacagtttctgat

SEQ ID NO: 4756 - DNA, 441 bp, Gossypium hirsutum
  Clone ID: LIB3493-038-P1-M1-A11
atccgatccatccatcatccccttcaaatatcaaatgcactttctctttcacccatctgtctcttttttctcttctctcgctgttatcaatggagccgtttctcgacgacttagccgacgatctacagagcttaagcttcacctccacttccactgctacaattaaccgcagcaccagctcagggtctgcctccaactccggctctttctcttttggctccttcgcttacgggctccttcttttccaaaccaatcgttccggcttccccttcctaagccgacttcggttctttatccggcctgggttccgccaatttaggttcggctacttaacccgacttaagttttaaaccacgccttccgacacccaaggccgccgatgctaacaacaacagcaacaaaggcagcaaaagcgatgtcgtttttgcagccaaagggatg

SEQ ID NO: 4757 - DNA, 444 bp, Gossypium hirsutum
  Clone ID: LIB3493-038-P1-M1-A12
cgttcttttgccgtcgtatttttttcagagatttgtttggttttcgcttctttcgatatggggaagatcaagatcggaatcaacggatttggaaggatcgggcgtttggttgccagagttgctctccaaagtgaagatgttgagctcgttgctgttaacgatcctttcatcaccaccgattacatgacctacatgtttaagtatgacagtgttcacggtcaatggaagcaccatgagcttaaggtgaaggactcaaaaacccttctctttggtgaaaagcctgtcactgttttcggcatcagaaaccctgaagaaatcccttggggtgagactggagctgattatgtcgttgagtctactggtgttttcactgacaaggacaaagctgctgcccatttgaagggtggtgcaaagaaggtaatcatctctgctcccagtaaggat

SEQ ID NO: 4758 - DNA, 443 bp, Gossypium hirsutum
  Clone ID: LIB3493-038-P1-M1-A2
gtgattttttcagctgccataggaataatggcctcaggtcaagccaacactttttctggggtgcattgttacaacaaggcaacaggttttggtggcacggggatttacttgaagctgcctggtcttacacaaacccggatagtgaattcatacctagattacactgggattgtggctgaagacccagtgcaacttcatatctctagcagttttttcctcggtgatgcatttatcctcttgaaatcaataaatggggtagcaaatggagtgactgtagtggataacatgttcagtggatctaataagggggttgatataatccagttagagggtcctttcacagaaattgatcaggttgtagttgataggaatagtgccaaggggatgaacattaaagcaacagttgcgagagggtctgttgaagggaatagcagctccaggac

SEQ ID NO: 4759 - DNA, 431 bp, Gossypium hirsutum
  Clone ID: LIB3493-038-P1-M1-A3
gtgctactatacgcattgtaagaacttaaagacaccagagacgtgcaaatttgcactttgaagaaacatatccatcacagcactaatcatggcccttctgaagacttggcggacatctgcattcagagcttatgggtactcgaatagcaccacaaacggctacatgggacactccctgaaattcaaaccccaagatatggaactgccaatagaggggaagaactgcgtggccacaggagcaaattctcgcattggttatactactgctgacgctcttgcatcatgtggagcaactgtccatatggtgtgtcagaacaaggagaagggagaaaccgctctttctaaaattcacacttcaactggcaatccaaatgttcatttggaagtttgtgatctttcgcacatcaccgagatcaagtcatttgcataca

SEQ ID NO: 4760 - DNA, 444 bp, Gossypium hirsutum
  Clone ID: LIB3493-038-P1-M1-A4
ggaaagtattgcatggtcaattttgatcatcgctcttgcctggctacttatgatcttactctactgcgctcaccccggtggtccagcttggggaaaatataggttcaaaatttgttcctctctttcttctcacgctaacaagccaattccagggcctagagggttgcctctatttggcagcatgaaccttatggccagctccctgcctcaccaccggattgcatccgctgctgagacatgcaaggctaagaggctcatggcctttagcctcggagatactcgtgttattgtcacctgcaactcggatgtagcaagagagattcttaacagctctgtatttgctgatcgtccagtgaaagaggcggcgtatagcttgatgttcaatagagcaatcgggttcgctccttatggagtttactggcgaaccctgaggagaatcgcgtc

SEQ ID NO: 4761 - DNA, 438 bp, Gossypium hirsutum
  Clone ID: LIB3493-038-P1-M1-A6
cgaaaagaaaggtcaaaagtctggtttccatggaagaagaagctgaatcacgcgaggaagtcaagccttacgtcgtcgttaaagagactaatggagatattgttggcgataacgatgcaggaaaattgggtaccattgaaacccctgattttctttcccagaaaatatcccataactgttccctaccgattctggcatctggagtaaataccacaagccttgctcaatcccaactcaccatcttctatggcggaaaagtttctgtatttgatgcaatttccgctgaaaagattcaagaaattatgcttattgctgctgctgtggctgctgctgatgttggctctgttgacatgaagaatgctgcaaccgattatgccaccatttcacctgctcttacaaggtgtccttcacttcaaagtactgcaactgctttggctt

SEQ ID NO: 4762 - DNA, 425 bp, Gossypium hirsutum
  unsure (1)..(425): unsure at all n locations; Clone ID: LIB3493-038-P1-M1-A7
tcccggttcaaccaacccttccgtgattttttaaactgccataagaataatctcctcaagtganagccaacactaatttgtggaaccgatactcaccacctgacaacaacttttggtagtacggagacttacttgaagccctctggaataacacaaacccttatagtaaattcatacctacattacaacgggatagtcgctggaaacccccagcaactctatatgtctagcactttttttctcggtcatgcatttatcctcttgaaatcaataaatggggtaacaaatggagtgactgtagtggataacatgttcagtggatctaataagggggttgatataatccaattagagggtcctttcacagaaatttatcaagttgtaattgataggaatagtgccaaagggatgaacattaaagcaac

SEQ ID NO: 4763 - DNA, 436 bp, Gossypium hirsutum
  Clone ID: LIB3493-038-P1-M1-A8
gccaaagagtccagagaggaaagagctccctcctgcacctaaagaggaagagcctgcaccagatatgaatgaaataaaggcactacctgctcccgaaaattatactccaccgccaccaccagagcctgagcctgttaaacccccggagccacaagaggatttagtgaatgtggcggaagacactgtgccacctgatgatcatgggaacaaattgcctggggctgcatttaatgctcctacagctaataatggggatggatcatgggaagctgtcccatcaaacggacctgaagtgacatctgcttggcaaaccccagctgctgagccagggaaggaagactgggagttggctttggttgagaccgctagtaacttgtcaaggcaaaaggcagctttgggggtggtctagatccattgctgttgaatggcatgtatg

SEQ ID NO: 4764 - DNA, 232 bp, Gossypium hirsutum
  Clone ID: LIB3493-038-P1-M1-A9
cccacgcgtccgcccacgcgtccgcccacgcgtgcgtgtaatacttaggagaatgtcatatgtaggttgatgcagcatatgtactttgcttgtatattgcatttggtagttgtttaggcccttgcacgggcttgtgttttaattggcttgaaggttgtgagtactatctgtgggtcgagtgaagatgtcacagcagtgaggttaaagatgttggaggtattttttggattat

SEQ ID NO: 4765 - DNA, 445 bp, Gossypium hirsutum
  Clone ID: LIB3493-038-P1-M1-B1
cggacgcgtgggcggacgcgtgggcggacgcgtgggttatcccttgtaggtaaagttggaggttttattgcttcaattcctgaagtcatggttgcggctctcctgtgcttcatgtgggcgatgcttgcagctttgggtttgtcaaatctacgttatagtgaggcaggaagctctcggaatatcataatagttggattatctttatttttctccctctcgataccagcttactttcagcagtatggcatctctccgaattccaatttgtctgttccaagttattttcaaccatatattgtgacatcacatgggcctttccgcactaaatatgaaggggtaaattacattatgaacacattgctatcattacacatggtaatagctttcattgtggctgttatactcgacaacactgtacctggaagcaggcaagaacgtggggttt

SEQ ID NO: 4766 - DNA, 445 bp, Gossypium hirsutum
  Clone ID: LIB3493-038-P1-M1-B10
gagagctccagccttgtcattttgctccaatgtattccgaggctcaactccgcagtgtgaaaagcaacctggcagtggcactgccatttttccaagagcccaatggggttgccgtggctccaatagttatcagcgcctcaaaaaaattagtttccgaagcaactgcaacaaaggcgacgccggttgtggttgcggcggcggaagcgacggtggaggtggactgagcagcattgtaacaagagaagtgtttgaagagatgcttccgtatagaaacgatcctcgttgccctgccgctgggttctacacatatgatgctttaatggaagctgcaaaggcttatcctacttttgctgcaaccggcgatgatgctactcgcaagagggaagttgctgctttcttcggccaaacttcacatgaaacttctggaggagtagggtggaatgca

SEQ ID NO: 4767 - DNA, 435 bp, Gossypium hirsutum
  Clone ID: LIB3493-038-P1-M1-B11
gttaaaaaaaaaatcctcaacagaaaaaaggaaaaaaaacaccccgaaaaaagattgacaatggcgttgcagtggatgattctaacgtacgtggttgcagctgaggcagcactggctctcctcttgacgcttccctctcccaagctcttgaagaaccgtttggtctctctcatctctctcattctgcaacctgcccttttcattgttccctttgccggattccagctcttagatatttactggaagaacgagcaccgcttgatgtgtacctctgagatctgcaccgctgctgagagagatcgttacgagaaatctttctacaaatctcaaagaaacgtgattctgtgcgtaaccgcatgcctgctttattggtgcatccaacgcatttgcaagtataacaaggaaattcagagcttggaggaaatagagaagaga

SEQ ID NO: 4768 - DNA, 435 bp, Gossypium hirsutum
  Clone ID: LIB3493-038-P1-M1-B12
tgtggccatagttgcagcagccattggtggagtttcccttgttttaatagtagttattttatatttcatgagacgaccagttgaaatagttgctccattgcaagaaaaaccttctactgctcgagtttcggacatttacttttcaccaaaggaagggttcactttccaggacttgcttgaagccactgacaattttgatgagagctttgttgttggcaggggagcatgtggaactgtatataaagctgtcttacctagtggccatgtcattgctgttaagaagcttgcatccaacagggagggaaataacaatgtcgacaacagcttccgtgccgaaattctaaccctggggaacatccggcatcggaatattgtgaagctttatggtttctgctaccaccaaggttccaatcttctactttatgaatacatgtc

SEQ ID NO: 4769 - DNA, 446 bp, Gossypium hirsutum
  Clone ID: LIB3493-038-P1-M1-B2
ggcagatccgagggtctccgctgctacttaggtgacatggagaaagttgctgcaacatccttatcattcttcaagcacgtccggaacagcgatgaatacaaaaacttacccgcattcctgtttggtgaatccatgggaggagcagcaacaatgctcatgtactttcaatccgaccctgaaacttggacgggtctaattttctcggcgccgctctttgtgatgcctgagaacatgaagccgagtaaggtgcggttgttcgtgtacggtctgctcttcggattagctgatacatgggcaactatgccggataacaagatggttgggaaagcaatcaaagacccagaaaagcttaagatcatagcatcaaatccaagaagatacactggaccaccaagggttggaaccatgagggagctggctagggtttgtcagtacattcaagacaa

SEQ ID NO: 4770 - DNA, 445 bp, Gossypium hirsutum
  Clone ID: LIB3493-038-P1-M1-B3
ccatggaggagccacaattgctgcagcagcaggaagaagaacaatcacaatcagtatctcttcaagattgcttgaagttactaaaaggcgagcgagacgagcaacgcctcgctggcttgcttctcgtcaccaaattctgcaaaagcgacgatctcgtttcccttagggctatctacgacgccgttggacctcacttcttggaccgtctctcaaggactgggttgggtaaaggtgtattgagcagtggtagtggtgaaaaccgggatgcgtatttgcagctgtcagtgacggttctgtctgcgttttgtcgagtttctgagattgcttcttcgaaagaaatggtttccaaggttccaatgatttttgaagtaatgtcaatgaaatcaggcatgcctgtgcttgaagaatgctatgaatttttatacttggtgtcaactgcttctga

SEQ ID NO: 4771 - DNA, 446 bp, Gossypium hirsutum
  Clone ID: LIB3493-038-P1-M1-B4
tggccctggaagtatcgtaaagatcaactttgttgaaggcctgccattccaatatatgaagcaccagattggaggacatgatgaaaacaaattttcatacagttacagtttgattgaaggtgggcctttgggggacaagcttgagaaaatcaactacgagaataagtttgaggcagctgtaggtggaggaagtgtttgcaagagctcgatgaaattttacacttttggtgactatgtaatcactgaagatgaaatcaaggctctcattaaagggagtgagggagtttacaaagctattgaagcttacctcttagctaaccccgatgcttgcaactaagatataggttgctttgaattttcatgcttcctttaaagacgggtcagattttaatgttgtgcttctgatattttctttttcatcttaaagcctaaactgtcatatgatt

SEQ ID NO: 4772 - DNA, 446 bp, Gossypium hirsutum
  Clone ID: LIB3493-038-P1-M1-B5
tccatggccgctctcaacagtatcgcctgccgtaaacccatcgttaaatcccagagtttccccgatttctctccaattctcccctccactcgtctctctcacaaaaccagctcaaacctgttaaagctcaaccccaaaaacagaagaaattgggtcattcaatcagtcacagaggacaaagaattggctccaaagaagaacagtcattcccatgaacataagaagcttttgttcccaaatggctccaaaactttggaggcttcttcttcagaggttggaggcggtcacggtgatgatggtgatggccatgatgatgtcgagaagttgagtagtagagcaatcaatgcctctattgttcttggatttggcacgcttgctgtatccaagttgcttacaattgatcatgattactggcatggatggacactttatgaggtactccgata

SEQ ID NO: 4773 - DNA, 447 bp, Gossypium hirsutum
  Clone ID: LIB3493-038-P1-M1-B6
ggaaagtgctccttcaatttttgaaagcgatattaagaaacagattttgatgtttgctgcatcaaacatttctgagaagtatttaccatcattccaagaagcagcgaaatctttcaagggaaagcttatctttgtttatgtgcaagtggataatgaagattttggaagacctgttgcagattattttggtgtcagtggagacggtcccaaactccttgcatacactggaaatgacgatgctaggaagtttgtctttgatggagaagtgacgttggataaaattaaggcttttggggaagattttttagaagacaggcttaaacctttctacaagtcggaaccaattcctgaaacaaacgatggggatgtgaaagtagtggttggcaataactttgatgaaatcgtattagatgagtcaaaggatgtccttcttgagatctatgcacc

SEQ ID NO: 4774 - DNA, 442 bp, Gossypium hirsutum
  unsure (1)..(442): unsure at all n locations; Clone ID: LIB3493-038-P1-M1-B7
cggacgcgtgggcggacgcgtgggaacaaggacattggcttggacaggaaggaaggggctcaaaattcaagaaaaactgatttgatctctaatgaagaggagtggtcaattgttcaaggagccttgcagatactcactgttgcagactgtctaacaagcaggtcttcggtctttgaagcatccttgagagctactctggctagattgggcgcaactttgtctcttttggtatttggttcaagtttggataataaccagctacatgttgcaaatgacgatggaaatggggagccaccattaggtggaagagctgccttagatgtcgcagctgtgcggcttgttgatgttcctgagaaggcccanaaactgtttaaccttttagatcactctaaagatccccgattccatgcacttcctcttgcatcccaaagggtcgctgcat

SEQ ID NO: 4775 - DNA, 317 bp, Gossypium hirsutum
  Clone ID: LIB3493-038-P1-M1-B8
cttatctgtcgttcattttaagcgacagattttaattttccggccaaatttccggtcggtttaaaatggatttttcaagcagaagaatatagtgaagcctacgcgctttaagtctatgaacctcttcctcttcttctttttttggttaagatctctttctttccttagaacagaaaaaaaaaagaaaaaggtttcccactaaatcggttgctttcattctaaagttacaaggcaacctcctgtgtatgaaaatcctgttactcttgcttcacaaactgcttttaatgttagtgaggttgtagcactttttgcgctat

SEQ ID NO: 4776 - DNA, 441 bp, Gossypium hirsutum
  Clone ID: LIB3493-038-P1-M1-B9
cccacgcgtccgtgttaaggcaaaaattcaggacaaggagggaattcccccagaccaacagaggctgatttttgctggtaagcaactggaggatggccgtaccctggctgactataacatccagaaggagtccaccctccacttggtgctccgtcttcgtggtggtatgcagatttttgtgaagacacttactgggaagaccatcaccctggaagttgagagctctgacacaatcgataatgttaaggccaaaattcaagataaggaaggtatccctccagaccagcagaggctgatatttgctggaaagcagctagaggatgggaggacccttgcagattacaacatccagaaggagtccaccctccacttggttctccgtctccgtggcgggatgcaaattttcgtgaagaccctgactggaaagaccatcaccctgga

SEQ ID NO: 4777 - DNA, 446 bp, Gossypium hirsutum
  Clone ID: LIB3493-038-P1-M1-C1
atttgagtcatgaaatcaatttgcagccttaagatctctccgcgtgttttctatttcaacgaaacaaagaagatccatggcgaatttgcaaaacccggccgtacagaggaaacgtgcgaaggaagccgtgcaaggattcactcgtgggagcctcaactttctaaccgattccagaagcttctggtgccctcctctgctgcactctctcttggtgttttgggcctcgggtatgggtttaggattattgggtcatgggttagggattttagaatttgggttgaaattatatttgggctggtaaaatttgtaaaaggacattgatatttggattttttgtttgtgtgtttttttttattttctattttttattctaatgggcccgggcgaaatgggcctattacaagtaaagttttagaattgtgattgattgaagaattagagtcaag

SEQ ID NO: 4778 - DNA, 442 bp, Gossypium hirsutum
  Clone ID: LIB3493-038-P1-M1-C10
gccattgatctcataaatgcggtttattcctttggctgaccaaaagatttagataaaaaaggagaaatttatacgaaggaaaggtgcgtactgcgcactttttctaattactctgattttgaatatgtcttttatcctttgattgaagatttttatgtttttttgggctcgctatgtcgatgaattcgaggattttcttccggtttcttgtttggcggatcttattcagcttgttttcaggattgatttcatcgggagtagttagattggattcaattgaaatatacaacacgcacgactggataacaaaaccgacggtgtatttcgtttgcaaaggagagaacatgacggttttgccagatgtcaccaaagcaaatactggctatactttcaagggtgaagaatcttggcagcctcttacagaacttacaagcgagaaatg

SEQ ID NO: 4779 - DNA, 363 bp, Gossypium hirsutum
  Clone ID: LIB3493-038-P1-M1-C11
ctcaaaattttaaacccacattcggtctatatctgggtggcgctcttttttccccagcaaataattactccattggaggagcttagggattgatggtgctgtcacatacagtatggatcaaacataaactgaatagttgcccaacaccagcaccatgcgaagattcgacgagcgaggactccattcagatgttcgccctaggcctatccgaaccttagatggataacaactgctatcagactgagatagctgattcaaaaactggcgcagagcttattgatataatcctcccccagggagggtatggggcctaaaataccaccgaccaaatggctttattagcaccgtatatgtgtggatcac

SEQ ID NO: 4780 - DNA, 443 bp, Gossypium hirsutum
  Clone ID: LIB3493-038-P1-M1-C12
cgaagcggaacatcatcaaaacacgctgataaagccgaggaattcagctttgctgaacttgttgcagcaaccaatggtttctcattagaaaacaagattggtgcagggagttacggggttgtttacttaattcctggaaaatgaggatcaaaatcgcactcgacgcggctcgagggatcgaataccttcacaactatgcagttccccctataattcatagagatataaagtcttccaacatattactcgatgcgaattggacagcaagggtttcagatttcggactctcgatgatgggaccggaatcagaccgagattacaagccaacaaaagcagccggaacagtcggttacattgatcccgaatactacggattaaacgtattaacaacaaagagcgatgtatatggactcggagtcgtaatgctagagcttctgacaggg

SEQ ID NO: 4781 - DNA, 444 bp, Gossypium hirsutum
  Clone ID: LIB3493-038-P1-M1-C3
gtcgttttgtggatgccgtgaactcaatgtcgaaacgctacgtgcctccgctacctgctccctcgcaacaatcaagccctttgttcaagcagcggtcatggtctcctgacgctgagcgagacgaggcgtggctcaggcggaaggaagtttacggctcggggatccgccgtagtcagagcttcacggaagatgatttggatgagctcaaaggttgtttagatttaggtttcggcttcgaaccagattcgcctgagttagatccgaaactatcccttgctttacccgctttgccgttttactgtgccgttaatcgtcagtacaatggcaggatatcgaggtcttcgtccgcgtcatcgatggactcttttagtgacgccggtagcgctaactcgataattgatcaaggcgatgatccggagacggttaagattaagttgcgtcaat

SEQ ID NO: 4782 - DNA, 447 bp, Gossypium hirsutum
  Clone ID: LIB3493-038-P1-M1-C4
ctgcagtaaacaacattgaaggaaatgagtttgagaaaacttgacaggaccaattgaagaaagactcgatacattcaccatcatttgctgagcctatgggtcgaatttctggtgctgttgatgatagccatacaggagagtccggagtggatgcttccgggactagcacactaagtttgcaaggggaggctgataatggctctattaagcctcaactcgatgcacccgtaggtgatgttttgaaatcaagcagtcacaatgatagtttggctggtcagtggggatctgtttcggtttcctcgatgcaatcagataacccggctgcaatcaacactgaaaatttatcaccaactggctcacatccgttgttggaaccagagaaagccaacataaacaaaccatcagcggtattgggagaaaaacatttcgataaatctgatgaattcg

SEQ ID NO: 4783 - DNA, 445 bp, Gossypium hirsutum
  Clone ID: LIB3493-038-P1-M1-C5
ctctcacttttctattaggtatagactgagagggaaaaaaaatgagctattcacataataccatgggctcaggtagtagaactgctagaaggacatttgattttggaaggacacatgttgttcgacctaaagggaaacaccaggcaactatagtatggcttcatggccttggtgacaatggctcgagctggtcccagctcttggaaagtcttcctcttccaaatataaaatggatttgcccaactgctcctactcgtcctgtggctttacttgggggatttccttacacagcatggtttgatgttagtgagctgtcagaaaatggtccagatgattgggagggtttagatgcctcagcagctcatattgcaaacttgttgtcaacagagccatgtgatgttaaggtcggaattggaggcttcagtatgggtgctgcaatggcact

SEQ ID NO: 4784 - DNA, 448 bp, Gossypium hirsutum
  Clone ID: LIB3493-038-P1-M1-C6
atcgatctcattctttaacgatctactgtcccctaaatggtgtgatctcaaaaaagtcgatcctgcaatcacttcgtctatactgcttcaacactattttcttttccaagcacacatatgcacagcacctacacccaaacactagctaccatataatatcctttcatggcctatctcacaatcgctctagactctccaacctctaagaccgtcttcctatttcaagctctaatacaaacgcaaaactactcctactcgtactgtagatttacttgcgggattcacttacacaatatggcttgatgttagtgatctgtcataaaatcctccagatgattgtgagggtttacatgcctcatcagctcatattgcaaacttgttgtcaacagagccatgtgatgttaaagtctgaattgcaggctttagtatgggtgctgcaatgtcactt

SEQ ID NO: 4785 - DNA, 442 bp, Gossypium hirsutum
  Clone ID: LIB3493-038-P1-M1-C7
gattagatgggggagaatattgatttcagacgctgggaggaattgataccggatgccttagggatgattttcaagaatcttccgctccaggaaatacttactgttgttccgagggtctgcaagtcgtggcggaaagcggttgctggaccgtactgctggcaggacattgacattgaacaatggagccaacaatgccggcctgaaacccttgatcgaatgcttcaaatgctgataactagaagctcaggttcactccgaaagctttgtgttactggtctcgctaatgaccagagcttttcactcattgcagataagttgctgggaggctttttttcggtgactttcttggatgttagttactgcaagaacatcggggctccagcccttggagcaattggtaagaactgtaagttactaatggggttgaggagaacaatgcacc

SEQ ID NO: 4786 - DNA, 443 bp, Gossypium hirsutum
  Clone ID: LIB3493-038-P1-M1-C8
gtgaaaaccaataggcatggggaattcaaggttcattggcctttttctgtgagcaaacatgtgaagaaaatcgagggatgtgaagttaaactgattaaaagcagtgaaccatattgtgcagtggcctcatctgctacttcctcttcactccatctcaagtcaaggaagcaaggaacccatgttttctcagctgggtttttcaccttcaagccattcaaacaaccaaccttatgcagccaaaaaccaagtgttcatcccaaccagcttcttccgccgcccattcttcctccaaacccacttctgccgccgcccattcttcctccaaacccacttctgccacccccagtgctccctcctaacccatttcagccgccaccagctccactagttccaaacccattgcagcctccaccagctccactagttccagacccattgcagcc

SEQ ID NO: 4787 - DNA, 439 bp, Gossypium hirsutum
  Clone ID: LIB3493-038-P1-M1-C9
gtgactattctggcggtgggcatcctttcggcatcagcgaccgctagaccctgcaagacattcttcgtggcctcctattctttctcttttgaaaaccctaacgacccttcctcctccaccggattcgtcaccgtcttcaccgagatcggtcaattgagcgtcgtaccaccgaaacccaagccgtccgatgtcttcagctctctccgtgagcgcagtaaggacatccttagcgtgatcgtcgctcttctcttcggcgtcggttgcggcgctctcacggcggctaccctctacttggtctggaccctcttctcggcacggtctgattatcatcgtgcttgtttggaggatgatgagagcgacggagaacttagccctaagaaggttgggtatgtaaccattcccaccgttaacgttaaggaagtcaattgatcaaattatg

SEQ ID NO: 4788 - DNA, 444 bp, Gossypium hirsutum
  Clone ID: LIB3493-038-P1-M1-D1
gattaaacgagaaatttcaacaatgaaactcatcatacaccgaaatgtcatccgcttgtatgaggtgatggctagcaagacgaaaatatacattgttctggaacttgtgactggtggtgaactttttgacaaaattgcaagcaaagggaggttgaaggaagatgaagctagaaagtattttcagcagcttattaatgctgtggattactgccatagcaggggtgtttaccatcgagacctcaagcctgagaatttgctgctagatggtaatggagttcttaaagtttcggattttggtttgagtgctttacctcagcaagttcgagaggatggattacttcacacaacatgtggaacaccaaactatgttgctccagaggtgatcgacaataaaggctatgatggagctaaggcagatttgtggtcatgtggtgtgattctctt

SEQ ID NO: 4789 - DNA, 442 bp, Gossypium hirsutum
  Clone ID: LIB3493-038-P1-M1-D10
gctttgtgttgggatacgtttatatagacagatgggccgataagcatcccgattcactcctcgtatccttgaacgtgcaccgattgctagtcacctgtgtcatggttgcttccaaggttcttgatgatgtgcactataacaatgcgttctatgctcgggttggaggagtgagcaatgctgagctgaacaggctagaattagaactgcttttccttttggattttggagtggcggtgagctcacaggtttttgagacctattgtttccacttggaacaggagatgttaattaatggcgttgatcagaaagttgaaagggggataagccccgttgctgttgatgagattgtgactgacatcggttgattgtttcgccgtctctcaagccatgggattggccccaagttcctatctccgtctctctcgtcttaaaatggggtctt

SEQ ID NO: 4790 - DNA, 442 bp, Gossypium hirsutum
  Clone ID: LIB3493-038-P1-M1-D11
gttctccccccttctccgtctttctggcaacatgggttcaccaccactttgggttctgcttctgggtgtgttgtttatggcttccggaacaatcgcagctccccctaagaagcctgtagatgtaccattctccagaaactatatgcctacttgggcttttgatcacattaagtatttcaatggtggctctgagattcagctccaccttgacaaatacactggtactggtttccagtccaaaggatcatacttgttcggacacttcagtatgcaaataaagctagtccctggagattctgctgggactgtcactgccttttatttgtcttctcaaaactcagagcatgatgagatagattttgagttcttgggcaacagaacagggcaaccatacattcttcagaccaatgtgttcactggtggcaaaagagacagagaacaa

SEQ ID NO: 4791 - DNA, 458 bp, Gossypium hirsutum
  Clone ID: LIB3493-038-P1-M1-D12
agaaagaagatccatggaactcgattatagctggtgctgccaccggagggtgtctttcaatgcgtcaaggacttggtgcagcttccagatcagcagtttttggtggggttttgcttgcattgattgaaggagctggaatcatgttgaataaatttctcagtcaaccacaaatgcctatcatgatagaagagccagcaccaaatgtagctggaatgcctggatacccaatggggcaattgccaaaccaagccccagtatcagttgacagcttgaggcaggcctcaccttcgtcatcatcaacatcatctggttcctcatcggattcttcatcttcatggtttggaggactttttggtggtggaaagaagcaggaatcagctacaggcagtggaagtagaactgaggttttggagagctttgatgctcctccggtgccatcatttgaatacaaatgaatt

SEQ ID NO: 4792 - DNA, 372 bp, Gossypium hirsutum
  Clone ID: LIB3493-038-P1-M1-D2
cgctgctgcatgctgcagtggggtaaaaacactctacggcgaggctcagacctccccggaccgccaagacgtgtgcaagtgcatcaaatcggcggtgaacggaatgccttacaccggctataacctcaatctcgcagccggcctacctgctaaatgtggtctccatcttccttacaacatcagcccctccactgactgcaacaaggtgcagtgaggttgatgatgatgatatggaagaaggagtgggagaaggtttcagctcagctagataaagtagctagctaaggttaaataagctgtgctggtgtgttgtttttcagcaaattccatgtataatcggggaaagaaaaagaaatagaagctgtactttct

SEQ ID NO: 4793 - DNA, 448 bp, Gossypium hirsutum
  Clone ID: LIB3493-038-P1-M1-D3
cccacgcgtacgccttcacaaccgtcatcgtcggcgatgcctgcacctgcaccgccggctcccacggcggtgactacaacttcaagaacgttagcgcctgcaccttcaacgaattcctcaattcttcctcaaaacaacaacaatacttctccttctccttccattgacccttcttcactgcaaaatcaacagcagcagcagcagcaaatctcgcaaattttgtctccacctcttgcccaacaacaacatcaacagcagcagcagcaacagcaaacacagccaaatgttgcagctttatcaaatttccaaatccagcaatcccttcaaagatctccatctatttcacgccttaaccaactccaacaacaccaacaacagagccagcagcagcaacaacaacaacatcagtctcaatacaataatgttttaaggcaagggttatatgggc

SEQ ID NO: 4794 - DNA, 447 bp, Gossypium hirsutum
  Clone ID: LIB3493-038-P1-M1-D4
cggacgcgtgggttcagatgtgattgatgatgatgatgagatgcatcatcataatcagttgtcttcattgttgaagtcccatagcaacaatgggagcagcaacagtattgtgtcacctgcggttcactcaagcaccaccagtgtccatgaacttctggaatgtcctgtttgtaccaattctatgtaccctcccatccatcagtgtcacaatgggcatactctctgttcgacctgtaaaacaagggtacacaatcggtgccccacttgtagacaggagcttggtgatattaggtgtctagcactagagaaggtagctgaatcacttgaactgccttgcaaatatacatcacttggatgcccggagatctttccttactacagtaaactcaaacatgaggccctatgcaacttcaggccatacaattgcccatatgctggatcagaatg

SEQ ID NO: 4795 - DNA, 447 bp, Gossypium hirsutum
  Clone ID: LIB3493-038-P1-M1-D5
gcgtggtttcgttgcttcaaactctaaggatgatcctgcggaggaggctgccagcttcacctctcaggtcatcatcatgaaccaccctgggcagattggaaacggatatgccccagtccttgactgccatacctcccacattgctgtgaaattttccgaattgctgaccaagatcgacaggcgatctggaaaggagcttgagaaggagcccaagttcttgaagaatggtgatgcagggatgataaagatggttcccaccaagcctatggttgtggagactttctctgagtacccaccacttggacggtttgctgtcagggacatgcgtcagactgtggctgttggtgtcatcaagagcgttgagaagaaggacccaacgggtgctaaggtcaccaaatctgctgccaagaagaaatgagattgcatttgatagtatcagagcctttt

SEQ ID NO: 4796 - DNA, 441 bp, Gossypium hirsutum
  Clone ID: LIB3493-038-P1-M1-D6
ggctgctgatgttacagattacatgcttcaagagacctggagggcacactttccttctgttaagggtgcaaaggttgtgattgataggatcactgggcgcacaaaaggttatgggtttgtcaggtttggcgatgaaactgaatataatcgtgccatgactgagatgaatggtgctttttgttcaactaggcctatgcgcatagggccggctactaacaagaagactggtgctgcacagcaatatccagcagcttcatcgcaagggactcagaacgagaatgatccaaataatacgactatatttgttggtaatttggattctaacgtgactgaagaccatttgagagaggtcttcagcccatatggtcagttggtgcatgtgaagattccacaaaacaagcgttgtggatttgttcaatttgctgataggagttgtgctga

SEQ ID NO: 4797 - DNA, 443 bp, Gossypium hirsutum
  Clone ID: LIB3493-038-P1-M1-D7
cttttgaatcttttttttggtggtgcagagaaggattggaaggcatttctccattgttgttttattcaattacaagctacttttttgttttggtagttttgagagtggaattagggaaaaaaatggagaagagcactccagtgaggaaaccacacacttccactgcagatctactcacttggtccgagactcctcaaccggatttcaccgcctccgccgcacgctccacccgccctcaccagccgtcggatgggatcagaaaagtggtgtttggaggtcaagtgaccgatgaagaatttgaaagcttaaacaaacggaaaccttgttctggatataaaatgaaggagatgactggtagtggtatttttgcagccgatggagaaaatgacgaatcagaacctggtagtgcaaatcctactccaaacaacaaaacagcaatacga

SEQ ID NO: 4798 - DNA, 433 bp, Gossypium hirsutum
  Clone ID: LIB3493-038-P1-M1-D9
gttatgctttagctgtgttagcaagcttggtggtgtcagctcagggctctgattttgcattttataagctgagtctgatatggccgacttctgcttgttatccactcgccaactgtaagactccaatacctactttcttcaccatccatgggttatggccaacatttgccaatgacaccgcagttcctgcttatgggcctaataatagatgccatgccaatcctgttgggtcccgatgctgctgtggctagactaaacaccattcaagacagactaaacccaaaggtggcaaaacttaaggcagggggttgaaaactttgtttttggaaacatgaatggcaaaacattggattgggctctggatatcctaaagatcctttgagttatttaaatgataccttaaaccttgcaacttccaccaaattggaccctt

SEQ ID NO: 4799 - DNA, 237 bp, Gossypium hirsutum
  Clone ID: LIB3493-038-P1-M1-E1
actgattcaggtctggtttccgatgaccaatggctttgtcgtggttactatacccaaaaagttattttcacaggaatttagagctttggaagggtttttacagggaatttgattgtaaaccatgtgtagatgcagtttcagttattttttttgtttttcttttcatatttgagtgatgtatgagtagatttatatgccaatactttaataaaagatagtttaggttgaattggattg

SEQ ID NO: 4800 - DNA, 436 bp, Gossypium hirsutum
  Clone ID: LIB3493-038-P1-M1-E10
ctgttttctattacaagatgaaaggagattatttggcggatttggcagaatttaaagcaggagatgatcgtaaagaagctgctgaccagtcacttaaggcttacgaggctgccaccaccactgcaaattcagatttgcctccaactcacccaattagacttggcctggctttaaacttctctgttttctactatgagatattaaattctgctgagagggcttgccatctggctaaacaagcttttgatgaggctattgctgagcttgatagccttaatgaagaatcttacaaggatagcaccctaattatgcagcttctcagggataatctcaccttgtggacctcagatctgccggaggaaggaggtgagcaatcgaaaggagatgagcctcaggcagagagttaattcgatggaagagcattgttctaaagact

SEQ ID NO: 4801 - DNA, 410 bp, Gossypium hirsutum
  Clone ID: LIB3493-038-P1-M1-E11
ctgactcgtggatctatctgtgcattataaacacgaggaggatctttcatccaaacaggacatacaacaatgaacaacataaatattcctacttaagaaatgcaaaaacttgtttagacaactagcaaggtcatcttcatatagtagcttaagatcgaaatcggctcgagaagatcttcgccattatatatgggatcatataagaagaagaacgaggaggaacgaacatggagataatgatgataatgatgatgggcaccaatgttacgaaacgatttatgtcgggagtacgaggaaacgatacgtggttagttcgaagtaccttaaacatccattattggatgctttaatagagaggtctaaacaaaagcatggaggggaagatcacatattggttaaatgtgaggtag

SEQ ID NO: 4802 - DNA, 443 bp, Gossypium hirsutum
  Clone ID: LIB3493-038-P1-M1-E12
tattcgcagtatgttgctaccttagaagagtaccgggtgcagagatacgagggtgcctccacactctatggtccacacacactcagtgcctacattcaggagttccagaagcttgcaactgctcttatcaaaggtcaacctgttgaagccgggatgccgcctccagatcttctacagaagcaaataagcttactcactccagttataatggactcaacccctgctggtaaaaacttcggggatgtcagctccgatgttccagctaactcaaccttcaagagaggcagcaccgtgaccgttgttttctggtcatcttgccccaggaatgatctcttgacagaaggtactttcgcccttgttgagatgctccaagggaaggatacatggaccccaatgtacgatgacgatgatttctgccttcgctttaaatggtcaagaccttc

SEQ ID NO: 4803 - DNA, 445 bp, Gossypium hirsutum
  Clone ID: LIB3493-038-P1-M1-E2
cttgatcttcagtcagggacgatacacttttacaattgaagggctgatacgagaacttgtaaggatccaaggacaagccctgagtgtccaagcactgggcacatgagtttagaccttgagctaaacttaccatgcgtttctaatgcaacaaatccggaagccgtgagcaagcaaaactgtgtcggctcagttgagaagaagctcaacagttggggaggattaatgcagaagcgtccgtggttaacgatggaagaggcgaaggaggaagaggaggagatggtagcaacagtgtgcaggcagtgccatatgttggtgatgctaatcaaatcatcacctgcttgccctaattgcaaattcaggcacccaccaccagacccaggccctccaaaactattcaaccaaaggcttagcctcctgtgctagtaaggcgtgatggatcatcaag

SEQ ID NO: 4804 - DNA, 443 bp, Gossypium hirsutum
  Clone ID: LIB3493-038-P1-M1-E3
gttttgtttctctttagtttacgtttttttgtccttttggaggttttgatactaaaaaagggaagcaaagaagaagggaaatggagggcaaagaagaggatgttagattgggagccaacaagttcacagagaggcaaccaattgggaccgcggctcagactcaagatgacgggaaagactattctgaaccaccaccgtctccatttttcgagcctggcgagttaacctcatggtccttttatagggctgggattgccgagtttgtggcgactttccttttcttgtatatcactattttgactgttatgggagttgttaaggaaaaaactaagtgcccaactgttgggattcaagggattgcttgggcttttggtggtatgatctttgctcttgtttactgcactgctggcatttcaggtggccatatcaacccggcagtgact

SEQ ID NO: 4805 - DNA, 444 bp, Gossypium hirsutum
  Clone ID: LIB3493-038-P1-M1-E4
ttcaactatctctttgacaaaggagagcacaaaaaaaaggtggtcttgttcttgttcaagttattgatcaatggctacggatgttgaggttggtggtgagttccaagccaaggactaccatgatcctccaccagctccattggtagatgcccaagagttaactcagtggtctttttatagggctataatagctgaattcattgccacccttttgtttttatacatcactgtgttaacagtgattggatacaagagccaagttgatccagataagggtggtcaagattgtgatggtgttggcattcttggtattgcttgggcctttggtggcatgattttcatccttgtttactgcactgctggtatctcagggggacatatcaacccagcagtgacctttgggcttttcttggctcgtaaggtatcattggttcgagccatact

SEQ ID NO: 4806 - DNA, 443 bp, Gossypium hirsutum
  Clone ID: LIB3493-038-P1-M1-E5
tcctttttgagcctggcatctttgctgatcctgaaggggagggtcttcgggcacttaccagagcccagttggatgagattctaggtccagctgaatgcaccattgtttcttcattatctaacaagcaagtggactcctatgtcctttctgagtctagcctctttgtctatccatacaagattataatcaaaacctgtgggacaactaagttgcttcttgctatcccacccatcttgaaattggttggcagtctatcccttgctgtaaaatctgttaggtatactcgtgggagttttattttccctggtgctcagccatttcctcaccgaaacttctctgaagaggttgctgttcttgataactatttcggaaagcttggcgctggtagcaaggcttgtgtaatgggtgggctggataaacagaaatggcatgtgtactctgca

SEQ ID NO: 4807 - DNA, 442 bp, Gossypium hirsutum
  Clone ID: LIB3493-038-P1-M1-E7
gcaaataaaactttgaattattcacacgaaacaatggggacccacttttttcccctggtttttctcctcattttttccttagcccaaggtctgaaccccaaatgtgacatccaagaccatggctcaaacctgcaagtgttccatgtttacagtccatgctcacccttcaaaccctcaaaaccactctcatgggaagaggatgtgctgcaaacgctagccaaggaccaagccagggtgcagtttttgtccagcctcgtggctaagaaatctgtggtgcctatagcttcaggcaggcagattgtgcaaagtccaacttacattgtgaaggccaatattggaaccccacctcaaaccatgcttatggccatggatacaagcagtgatgctgcttgggtgccttgcactggctgcattggctgctcttctactgcttttgactttg

SEQ ID NO: 4808 - DNA, 435 bp, Gossypium hirsutum
  unsure (1)..(435): unsure at all n locations; Clone ID: LIB3493-038-P1-M1-E8
cttttacattactcgaatgcttttctttttctcttnagattttatttgcaggcccagctgccatttccagcttctttttttgttagagacgtttcctgttggagcttaaatcactgcgttattcggatcggcgaaagtttcattcttccagaccatactcaccctgcacaccctaaccacctcgctcatacgaaaacggtgttcgttaaacgctagccaacgaccaagccagggtgcaacttttgtacagccctcatgctaaaaaatctgcggtgcctatagctttatgcaggcagagtgtgcaaagtccaacttacattgtgaaggccaatattggaaccccacctcataccatgcttatggccctggatacaagcagtgatgcttcttgggtgccttgcactggctgcattggctgctcttctactgcttttg

SEQ ID NO: 4809 - DNA, 211 bp, Gossypium hirsutum
  Clone ID: LIB3493-038-P1-M1-E9
gttttgtcctactatgtgttatattatgtgcctactaggctacctttcccgggtatcaagagtgcctatatagaactctctctctcaaaaaaaaaaaaaaaaagagaaaagagttctttatatggagttttatattatatgctgagagaataaattatcttgtaaaagcatgctttgttaatgaaataaatttctattactatgattgtcc

SEQ ID NO: 4810 - DNA, 444 bp, Gossypium hirsutum
  Clone ID: LIB3493-038-P1-M1-F1
cggacgcgtgggaaaaaaacagcataacatacagtaaaccggggcaagtctttaacaagcttcaaagaatagaagcttgcataacacggaagcaacaggtaataaaagacatcgtaagcacactcaatcacacgtacttcttagtactcatcatcttcaccctcatcaccctcagctgactcagcaccaacttcttcataatccttctccaatgcagcaagatcctcacgagcctctgagaattctccttcttccataccctcaccaacataccattaagaccaagcgcaccattcagtttgtcgatcggtgtcctactggatgcaagtgcggaatcaactaccaaccacccactgttgtacctggcggtgatctcgccaaggtccagagagctgattgcatgattcataactgcaccagtgttgctgaagtcttctctcgcat

SEQ ID NO: 4811 - DNA, 440 bp, Gossypium hirsutum
  Clone ID: LIB3493-038-P1-M1-F10
ctttcagcaatcgaatgttcatgtacatgacttgctagcttttcaaaaggacagttttaatctaagtcacaagatcaatagattagctttcggagattacttccccggggtcgtgaatcctcttgatagtgttcattggactcaagaacagccaagtgggatgtaccagtactttctcaaggttgtccctaccgtgtacacagatgtgagtgggcacactatccaatcaaatcagttttctgtaacggagcattttaagggtgcagaagtaggccggcttcaatccctccctggagttttcttcttttatgacctttctcctatcaaggtgacttttacagagcagcatgtctcgttcttgcactttctaacaaatgtttgtgctatagttggaggtgtttttactgtttcgggaatattagactcttttatataccatg

SEQ ID NO: 4812 - DNA, 443 bp, Gossypium hirsutum
  Clone ID: LIB3493-038-P1-M1-F11
taaggttctccagcccttcgatgggaacaagttcagcttcaccaaggtcgggcaagaggaggttctcttccagtttgaagcaagtgaagatggtgaagttcagttctacccaagtgctcccattgatgttgagaattctccaagtgttgttgccataaatgtcagtcctattgaatatggacacgtgctgttgattcctcgaatccttgaatgcttgccccagaggatcgaccgtgagagcttcttgcttgcactttatatgacagctgaagctgggaatccatatttcagattgggttataacagcttgggtgcatttgctacaatcaaccaccttcacttccaggcttactacttggctgtgccctttcccatagagaaagctccaacgaagaagataaccactttgtatgatgaagtgataatctcagagcttttaagct

SEQ ID NO: 4813 - DNA, 444 bp, Gossypium hirsutum
  Clone ID: LIB3493-038-P1-M1-F12
cggatccttgcatcttccgaagaaatgaatgcgtgtctgagaggaagacacgcaaactgcaagagcactgccgccgattatgcagccgtcaacgccggcgatgtcaaactacgcgcctccatgactgacgccaggattgtcaacggtcccagcttgaacggtttaacttttgccattaaaaaacccggtttctaccgttacgtcccccaaaagttaatgaacacatttaggtttgcgaagaatccattgaagctaagttacggtcgcaagagagaggacaaacggacggtggtcgacggggctctggtgttcgattccggtagccaggtgtcggcttcttacatgattggtacgaggaactgtaagctcaagtatagttacttgcatggaggtgttacgacattggagccttgctatgatttggggaagaatgtatggggtttc

SEQ ID NO: 4814 - DNA, 445 bp, Gossypium hirsutum
  Clone ID: LIB3493-038-P1-M1-F2
tgaaaaccaaggtcttaagagattaaatggagggttccttggtgacaacaatagaggtctatgtggaacaggctttccaacattgagagtctgttcacgttttgacaatatgaacatcaaccagcttgaacctttccaatctgatctgaatgacacggttccaagggttaactcgcatatagtacataaccaaggacattgcaaccacactcattgctcgaatccgctgagattcccgaaattacctattattacagggattattacagtcggtttcgtttttatgttttctgtatttcttgcaattttccactaccgtaggaagaaacaaaagattggaaacacatgtgaatcttctgatgggcgccttagcactgaccaccaagcaaaggaacttcaaaggaatggaagtgtttctccgcttgtaacactcgaatattcatat

SEQ ID NO: 4815 - DNA, 437 bp, Gossypium hirsutum
  Clone ID: LIB3493-038-P1-M1-F3
ctaatgtggagtttttgggagttgttgctgacacatcttatgattgcagctactttctaaaccttcataaggcgacaggtcattctgtcctcgtttatatgcctgctgggcagctggccagagacattgagaaaatgtctgatgaagctgctgtggagtttgcttttatgcagctcaagaagatccttccagaggcatgggccccgattcagtatcttgtttctcgatggggcacagatgtgaacacactaggctcctatagctatgatgcagtaggcatgtcccatgacctgtatgagaggctaagggtgccagtggataacatattctttgcgggggaggcaaccagtatgagctacccagggtccattcatggtgcattttcaactgggcagatggctgctgaggactgtaggatgcgtgtactggagcgatat

SEQ ID NO: 4816 - DNA, 446 bp, Gossypium hirsutum
  Clone ID: LIB3493-038-P1-M1-F4
cggacgcgtgggggcgaccaatttgatccgtcgagcgatgaacatgacgtcacgtttgcggtcatcgacagtggctccagcgtcgcggctggtgttggaccgtccttacgccaccgaaacggaagctcaaaaggtggaactgaaagcctcctccggcagcggcggcaccagcatgaaaaccttccaaatctatcgatggaacccagataatcctacgaaaccccaacttcaagacttcaaaatcgacttaaaagaatgcggacccatggtgcttgatgccttgatcaagatcaagaacgagatggatccatcgctcaccttccgtcgttcctgccgtgaagggatttgtggctcttgtgcaatgaacatcaacggttgtaacgggttagcatgtcttaccaagatcgaatctggaccgtcggaaacgacgatcacgccgttgccgc

SEQ ID NO: 4817 - DNA, 446 bp, Gossypium hirsutum
  Clone ID: LIB3493-038-P1-M1-F5
cgattcagcccattacttcgtgcctcaaggccgaagaggcgtggagctagttggtggaaaagagagtgcaatcgctcaaataacaagaaccattgttggcaagacatacaggctctccttctcggtgggcgatgctaacaactcctgtgcaggttctttggtcgtcgaggcattcgccggtaaagccacactcaaagtcccatacgaatctaaagggactggtggattcaagcgagctgcacttagattcgtggctgtttccaacaggacaagaattatgttccttagcacgttctacaccatgagaagtgatgacttttcttctctatgcggtcctgttgttgacgatgtgaagcttttgagtattcgtaacccttgatcatcaccgaccttgttcggggctgttgatgatccattgttggacgtggtctatcaacattttgtct

SEQ ID NO: 4818 - DNA, 445 bp, Gossypium hirsutum
  Clone ID: LIB3493-038-P1-M1-F6
caaaaaccatctttttttttctgctttctcgtatagcgtgctggtttgagaaacttttttttttttgagggaatcacaaaatgtcatcggagaacgggaaaaggttgctggaaactgatgccggcggcttgaattttgaggctaccgagctgactttagggttacctggagagcctagagtaacatcggacggtggagctaagttgggcagtaaacgtggattttccgaaaccgttgatcttaagttgggtgacaacaatcgagaggttaagctgggtcactccctccaagaagctgctaagtctcctgtttcaaagacacaagtggtgggttggccgccggtgagaggctttgcaaagagaggaaagaagagttgcaaatatgtaaaagtggcggtggacggtgcttcatatttaaggaaaggtgatctctagatatacaatac

SEQ ID NO: 4819 - DNA, 431 bp, Gossypium hirsutum
  Clone ID: LIB3493-038-P1-M1-F7
gaaaagtgaagtatttcactgaaacagaagagaataatgagatgagagggccaaggaccggagtcccgtatttcttgtaatcgaaaagagatacatactgcagtacttgtaatattatccaagcatttgattattgaaaggtgtcaaaggaggaagccttgaaatacataaaatgttttgcagatgggacctgccctggaaattgtctggtccaagccctgctttaacctcgaaatgttcctcttcgaccttcgacttcgtcttttccttcatttttcgcattcggtttttttttttttgttaatagatgctgcttctactttatgcttagctaatgtgtgtgtttttgaattgttggggatgtgtatttgtttcatttatgtatattggctctcaactttagggcttaaattggcttaatggtttctttt

SEQ ID NO: 4820 - DNA, 427 bp, Gossypium hirsutum
  Clone ID: LIB3493-038-P1-M1-F9
gtgcaatcgctcaaataacaagaaccattgttggcaagacatacaggctctccttctcggtgggcgatgctaacaactcctgtgcaggttctttggtcgtcgaggcattcgccggtaaagccacactgaaagtcccgtacgaatctaaagggactggtggattcaagcgagctgcacttagattcgtagctgtttccaacaggacacgaattatgttccttagcacgttctacaccatgagaagtgatgacttttcttctctatgcggtcctgttgttgacgatgtgaagcttttgagtattcgtaacccttgatcatcaccgaccttgttcggggcggttgatgatccattgtcggacgtggtctatcaacattttgtcttactaaggatgatttttttttttttggttctttgtgggcttggaaa

SEQ ID NO: 4821 - DNA, 331 bp, Gossypium hirsutum
  Clone ID: LIB3493-038-P1-M1-G1
cggacgcgtgggctgatgttgagagtttgcttggaaagggtcttgagaatgagtcctttactatggtggagctgggtctaacaggctccaaagacaaagacttgagggagtattcatacggaaacggtcaagtgaagattgaagacgaagagagttttgaaggtggcatggggagagaaccctttgagtttagctttaactatgactctccaccaagctgtggaggggtggatgagatcataaaggaagaggactcaatttatattaaagaggctggtgaatgccatgtgaatcctgcgaaaattaagaacccgtggacactaccgagctt

SEQ ID NO: 4822 - DNA, 439 bp, Gossypium hirsutum
  Clone ID: LIB3493-038-P1-M1-G10
gtcggagacaaagttgtaactgttcggttcttccgctggtacaaacgtggagtgtgatcgtgtctttgtcgatcaccccatgttccttgagaaggtatggggcaaaacggcttccaaaatctatggccccagagcaggtttggactacgaagacaatcaactgcggttcagcttgttatgccaggctgctttggaggcacccagggttctaaatttaaatagcagtaaaaatttctcaggaccatatggggaagatgttgtctttattgcaaatgattggcacaacgctcttcttccatgctatttaaaaagcatgtaccagtcaaggggtatctacatgagtgcaaagggtgtattttgcattcacaacataacctatcaaggaagatttgcctttgcagattttaaacgttttaatttgtctgaacggtttaagagt

SEQ ID NO: 4823 - DNA, 384 bp, Gossypium hirsutum
  Clone ID: LIB3493-038-P1-M1-G11
ccaccatcaaccttgccatgctttaggcgatctggttgggatcaagaaacactttaggaggaaacacagtaaccataaacaatgggtgtgtgagaaatgttcaaaggggtttgcggttaattttgatattagggttatcttaaaacttgtggtacccctggccattcttgtgactgcggcagagttttttcaagagttgagagtttcatagaacattaagatgcatgccgtatggggcaattacaaaaagtgcagcagccacctatcttgtctccaacagctttaaacccaagtacttcatctagtgataccatgttcttcaaccctacaaaagataattccaccaacacaaacccgggcgaccaccacaatttggagctttaa

SEQ ID NO: 4824 - DNA, 251 bp, Gossypium hirsutum
  Clone ID: LIB3493-038-P1-M1-G12
atctgctctacagacaaacttgagaaatctttgagaaggtctgaaatctattccagcattttcttatagcgattagtttgagaatggaggcgaagctgatagagaggctggaagccgcggtggctcggctggagtctctatcggccggtggaatctcggcgaggggattaccggacggtgttgatgagggcttgactctagcccgactttgggaaatgacttgagaggtgtagcaatatgcggcttggggt

SEQ ID NO: 4825 - DNA, 343 bp, Gossypium hirsutum
  Clone ID: LIB3493-038-P1-M1-G2
ggtttctacttgctgggcttagataacacatcaccaacctgtgcgtcagcaatccaaaactccgtcccagccattaccttcctaatggcagccatactacggatagagaaagttcggctaaatcgaaaagatgggatatcgaaagttgcaggaacaatcttgtgtgtggctggagcatcagtgataactctatacaaaggtccaacgatatacagcccaattccacctctgaatagacccaccccgacgttcgtttcattgggagatgcagaaggaaagaactggacccttggttgtctctatctgattggtcattgcctatcctggtctggttggctggtgt

SEQ ID NO: 4826 - DNA, 441 bp, Gossypium hirsutum
  Clone ID: LIB3493-038-P1-M1-G3
gctgatttagttcatgggaatggagatgcagattcaaagctgaaatctattgagaaacatctacaagaggtccacaggtctgtgcagatcctaagagataagcaggagcttgcggagactcagaaggagttggctaagctacaacttgcacagaaagagtcttcttccagccattcacaatctactgaggagagagtatcaccacctgcctctgatcctaaaaagactgacctcacatctgagatgcaaaaccaacaattagctctttccctacctcatcaagtagcatcacaacaacagcccgtggcggcacactctcaagccccacctcaaaatttgacccaacaatcctactacatgccttcaaatcaattatccaaccctcaagctccagctgcagcttcttctccagcccccgcccctaaccctaaccctccccct

SEQ ID NO: 4827 - DNA, 432 bp, Gossypium hirsutum
  Clone ID: LIB3493-038-P1-M1-G4
ctttcccgaagacggctagccatggcaatatcttaatcgctaaggtatacattcaaggttgtactccatactccgctgagaataaccgggcactacagacactgctagtgctgtgacgcaatcttgtcgtaccaaagatgttccctaagaggaccagcatggtgcaatgctacatgcagggcgaagatacaagtagggtagttccaagggggaacaaagagtcactagcgagagctgatactgaaccacctgctaactcttgaccacgtgaacacagggaccgaaacagtggtgaggtgtgagatccgtacaccgattcgaacgaccagaataaggcgaggcacgcaacatcactctctgactgagtatattgatggtgaccaacatggaagcgcaggaaccatacgctgcctgaggcaacgatatgcatga

SEQ ID NO: 4828 - DNA, 201 bp, Gossypium hirsutum
  unsure (1)..(201): unsure at all n locations; Clone ID: LIB3493-038-P1-M1-G5
cggacgcgtgggcatgtacccctaaaggatgcataganctgttncatagatatggtggtgatattaaaggaaananggctnttntnatttgtcggagtaatatngttggaatgcctgcagatttgttactgcaaagggaagattctactttaactattgttcattctagaaccaaaaattctgaggaaattatcatgaaag

SEQ ID NO: 4829 - DNA, 429 bp, Gossypium hirsutum
  Clone ID: LIB3493-038-P1-M1-G7
attttatttatagataatgtatagctagctctttggtgtggacggatttcttacaattcttttatttacatttggtgattaggtggtgtggcgtccgctggagcaagtactgctcaatagaaaacatgggatatcataagcagcaacaacaacctcgtgtgtggctggagcatcactgataactctatacaaaggtccaacggtcttcaggccaattccacctctgaatagacccaccccgacgtgagtttcattgtgagatgcacatggaaagaactggacccttggatgtctttatctgaatggacattgcctattctggaccggttggctggggttgcaagcaccggtcctgaagaagtgcccagctagactctgcgtgacgttctacacatgtttctttggtctcattcagttcctcggcattgc

SEQ ID NO: 4830 - DNA, 251 bp, Gossypium hirsutum
  unsure (1)..(251): unsure at all n locations; Clone ID: LIB3493-038-P1-M1-G8
ttcacactgtcctcatctccacccaccattatgagacgtttacaaatgatgaaggggctgctgacctcaaanagcatgttatcaagcctgtcattcctgagaagtatcttgatgggaagacaatctttcacctcaacccatctggccgctttgtcattggtggtcctcacggagatgcaagtcttacctgccgtaagaccatcatttacactcacagtggatctgtagctcaaccctccccggactttctt

SEQ ID NO: 4831 - DNA, 226 bp, Gossypium hirsutum
  Clone ID: LIB3493-038-P1-M1-G9
aagaagagatgaaaagtatggagggaattcaacacaaagcagtgagcgtcaatggcatcaacatgcacatagccgagaaaggggaaggtcctttgattctcttcatccatggcttccctgagctctggtatacatggcgccaccagatcaacggtttagctgccctcggctaccgtgctttggcgcccgaccttcgtggttacggtggaaccgatgcgccagattg

SEQ ID NO: 4832 - DNA, 445 bp, Gossypium hirsutum
  Clone ID: LIB3493-038-P1-M1-H1
ataaaatctgcaatcttaattctgtcggtgtttttatctgtgagcttcagttcgggtgttaggttgctccaggaacagcccaatgatgacctcaaaaacatggacgctattcctcccattgatgcactcaaccctaccgagttcaatggacccggtgttggcattcacgaagatcatgttgtcccaaaaggttccgaaattggtactcttggttttggttttgaaggtggtcctgaaaaatgttgttcttctggatgttccggtaattgtaatcctggtggtttcgttctaccatttcctcaaattccagaaatcccaagaattccacagatcccacagatcccacaaatcccacaaattccactaatcccacagatcccacaagtcccacaaatcccactaatgccaggacagtcgggatgtgagagtggggagtgttaccgtc

SEQ ID NO: 4833 - DNA, 437 bp, Gossypium hirsutum
  Clone ID: LIB3493-038-P1-M1-H10
gcagtctctcccgctccttctcgctgcgatttcgtgtagagatctcagttctcaaatcgtagcgctcttttctatcaagccatggctctgatcttgcatgcaggaaaaacaaacaaaaatgcctttaaggcactcattgctgcagaatatagtggtgtgcaggtcaaaatggttgagaattttgagatgggtgtgtcaaataagactcctgagttcatcaagatgaaccctttggggaaggttcctgtgttggaaacacctgagggtccggtatttgagagcaatgccattgctcgttatgttgctcgctcaaaggttaacaaccctatatgtggttctacattgattgattatggtcatatcgagcaatggattgattttgcagccatggaaattgatgctaatattgccaaatggttgtatccaagacttggtta

SEQ ID NO: 4834 - DNA, 402 bp, Gossypium hirsutum
  Clone ID: LIB3493-038-P1-M1-H11
ccggttgatgaagaaggagttgaggatgcatttgaactacttcatgaaaccaatgaacgtgtcaggaccggcatttgggttggggactgtttcatttacaacaacacttcttggaggcttaattactgtgtcggtggagaggtaacgacaatgtttcatttggatcgtccaatgtacttgttgggatatcttgctagccaaagtcgggtatatctgatagacaaagagttcaatgttatgggatacacattacttctcagcctgattgagtacaagactcttgtgatgcgtggagacttggaaatggccaatgaaattttaccttctattcccaaagagcaccataatagtgtggctcatttcctggaatcacgaggcatggtagaggatgcactagtagta

SEQ ID NO: 4835 - DNA, 444 bp, Gossypium hirsutum
  Clone ID: LIB3493-038-P1-M1-H12
aaaatccaagattttgaggtttagagatggataagtgtttggttctgtgttaaaaaaatagaggtcagaaaataagaggagagaattttggggatttaagatctgggattctctccgtagatagaaaaaatggtgaaactttgtttaatggcttctcatgggtacgctcccagcccgggacttgtttttcaccaggaaaagggtgctagcaggatgatcaaggaatgtcaaaccttgttgccaagtaaagcaatgaaacatgacatggtacaaacggctccctttgatctgaagtgcaatggaatcaaagagctgccaaaaccagttacccttctttgtgagcctaaactgattgtagatgtcgatccaaaagcacaaaagcctatggttattgataaaccagttgctcatctagacacagctctctttggctctgggatagct

SEQ ID NO: 4836 - DNA, 441 bp, Gossypium hirsutum
  Clone ID: LIB3493-038-P1-M1-H2
aagttgtactccgtcaaaaccacgacatttcacttcctgcggctcctttacctgctctgctcttcctttgcttatggatccctacaagcaccgtccttcaagtgctttcaattccccattctggacaaccaattctggtgctccaatttggaacaacaactcgtcacttactgttggacccagaggtccaatcctccttgaggactatcatctggtggaaaagcttgccaactttgacagagagagaattccagaacgtgttgtccatgctaggggagccagtgcaaagggtttctttgaggtcacccatgacatttctcagcttacatgtgcagattttctgcgagcccctggagttcagacccctgtaattgtacgtttctcaactgtcatccatgagcgtggaagccctgaaaccctgagggatccacgtggttttgc

SEQ ID NO: 4837 - DNA, 445 bp, Gossypium hirsutum
  Clone ID: LIB3493-038-P1-M1-H3
cccacgcgtccgatcgaaatgctgcgcaagaagttaatgggatttggttctataatccgcgtgaatgtgaggatgttgcaaacctctttagtagaatacttaatgcatatacaaaagttcctgcaaagccaaagacatctgcaagcaaaagtgaatttgaggaactagaagctgttcctagcatgtctgtaatagaaggtcccttggagccaccagcaactgcctctcgtgctactgatgctcctcaagattcatcatttgttaacttctttagtgctgctatgaatcttggaagtaatgctccaaatggtacaaaaccaacacagccttaccattctatctcgaccacccctctgtcttctcatgctccaactgccatacccactcctactcctgctccatcagtgtcatcccttccactttctgctgcacctttggttgattc

SEQ ID NO: 4838 - DNA, 444 bp, Gossypium hirsutum
  Clone ID: LIB3493-038-P1-M1-H5
gctcttctggggttttcctgcttgttcctctcttaattgcgtgctatattgaggatgggttgtactaagaaaactctggctttccttttgatgctggcttttgtgggagtctctcttggtgcggttcacaaagtgggcgattccaccggctggactagtcttgggaatattgactacctcaagtgggcttccaccaagaatttccatgttggcgactctcttctttttcagtacaaccctcaattccacaacgcgatgcaagtgacccacgacgatttccagtcatgcaacggaacatctgccatcgcctcctacacctctggatccgactccgtaaccctcaaaaggcctggccacttttatttcctttgcggtgttccaggccactgccaagccggtcagaaagtcgacgtattggtcaaatcatcgtccaaagccccaatt

SEQ ID NO: 4839 - DNA, 258 bp, Gossypium hirsutum
  Clone ID: LIB3493-038-P1-M1-H6
tttgttttcgccggtaagaagcgaggaacaggaaccgaggactttgactgggatgatagttttcgttccaacaaattaatgttggcaagacttggtaactgaaggcgacacttcttgtaggttagacaactctggccatgaattcggtgaccatggtggtgattagaattgttcaatagccttggtgggatatatcgctagccaaagtgggatatatctgattaacaaagaggtcaaagttatgggatacacattact

SEQ ID NO: 4840 - DNA, 440 bp, Gossypium hirsutum
  Clone ID: LIB3493-038-P1-M1-H7
gaggaacttgagctctcaggttgtgagaggctggagaagttgccagagctgagtgctcttcaaaaactgaagattctcaatctaaatggttgcagcaacctcaaaagccttccagacttaacatccctattgaaacttgagaagctcgatctacatggtactgtattgtggttaaatccctgagtcatattaaagacctccaaatatgaccctaaaggtgagcacattgccccccttcttgacagccataatttcttcatgtaactttcgatgagaggttgttcaagcttaccaagaggtctattgggaactggagttgaaatttgctttattaaggtttgcacatttaaagcaccttcatctgctggacttgaagtttcccccagaacaagtttagtagcctactggaggagcagttatgtgtgtaaaaataaactttt

SEQ ID NO: 4841 - DNA, 403 bp, Gossypium hirsutum
  Clone ID: LIB3493-038-P1-M1-H8
gttttcaaagtagtcttgattggtgactctgccggcgggaagtctcagattcttgctcggttttccagaaatgagtttagtttagattccaaggccaccattggagttgagtttcagactagaactcttgttattgaacacaagagtgtcaaggctcagatctgggacactgctggtcaagaacgatacagagctgttacgagtgcatactataggggtgctgtcggagcaatgctggtgtatgacataacaaaacgtcagacctttgatcacattccacgttggctggaagagttgcgtggccatgccgacaagaacattgttattatcctgctcgggaacaaaagtgaccttgaaaaccagcgagaagttccaaccgaggatgccaaagaatttgctcaaa

SEQ ID NO: 4842 - DNA, 442 bp, Gossypium hirsutum
  Clone ID: LIB3493-038-P1-M1-H9
ttcaggccctgaaccttctgctgtgacatatcaaataatacttaaaatactagttgaggggaacaaatttaaggaagccgaagaagtttttgagacacttttggagaaggaaaaatatcctttgaagcctgaccaaaaaatgtttcacatgatgatttatatgtataagaaggctgggagttatgagaaggcccgtaaactatttgcgctgatggctgaacgaggagttaagcaatccacagtcacttacaatagtcttatgtcatttgaaactaattacaaggaagtgtcaaagatatatgatcagatgcaaagagctggtcttcaccctgacgtggtgagttatgccttgctcattaatgcttatggcaaagccaggaaggaagaagaagcattggctgtttttgaggaaatgttggatgctggaatcaagcctacccat

SEQ ID NO: 4843 - DNA, 355 bp, Gossypium hirsutum
  Clone ID: LIB3493-039-P1-M1-A1
ccaaaaccctggttaataaataccattcgtcggatcattttaaacccttttttggttttttttggccgccgcctgcgtttttttcttaatctttttgaaccaaaaagtctttagtttttcgcttcgagagagaccatgtgggtttaccaggatctcatctccagtgacgagctttttttgactcattccctacaaggaaatcgagaatgggatgctgtgggaagttgagggaaagtgggttgtgcaaggagctattgatgttgacattggtgccaatccttcagccgaagatgctgatgaggatgaaggtgttgatgaccaatctgtgaaggggtgtgacattgttgacactttc

SEQ ID NO: 4844 - DNA, 430 bp, Gossypium hirsutum
  Clone ID: LIB3493-039-P1-M1-A10
caaattgttcaatggaactgaagggagatgctgctgagttgtgttgtgttctttttgctaatacaagaatcaggtccactatggctgcagctcgttgtgttgagcctctagtgtctctccttgtaactgaattcagtcctgctcatcactcagttgtccgtgcattagataaacttgtggatgatgaacaactggcagaactagttgctgcatatggtgctgtaatacctcttgtaggtcttcttgatggtaagaattacatgcttcatgaggctgtttcaagagctcttgtgaagttagggaaagacaggcctgcttgtaagatggaaatggtgaaagctggggtaattgaaagcgtacttgatatccttcatgaagcgccagatttcttatgtgctgcttttgtggaattgcttccgatactgacaaa

SEQ ID NO: 4845 - DNA, 217 bp, Gossypium hirsutum
  Clone ID: LIB3493-039-P1-M1-A11
caaatacttcaatggaactatatggagatgctgctgaattgagtcgagatctttttgataatacacaaattactttcactatggatgaagatgattgtgttgatcctatattgtctgtccttgtaactgaatacagtactgctaatcactcaaatgatccggcattatattaacttggagatgatgaacaactggccgatactagttgatgtatatt

SEQ ID NO: 4846 - DNA, 447 bp, Gossypium hirsutum
  Clone ID: LIB3493-039-P1-M1-A12
aacatattgaatacacgcactaacttattctgtgctttcaacgggatcgaattctgtaagttgccttggaaagcacgattcggcatgtatgtgccggccaagcagcaaccactacttagatgcatctagtctcatcaagtcctgctgcaccttgtacatgttaaatactggtctaagtggagaccttttaactggtaagtaaagctgattctactcgcattgattgattaagtgggaagacttgaaggctaattgtgtttgattactttgctgctggtttctgcaaagtttgttttttttttttttcaaactcagtgaataccattgccaaccactgtctcacacattctaacccaatatgatgaacatcaatttgtaccttatgactctcgtatgtaatatatatttatattggtatgaatatacacgtgtccaaaagatgggact

SEQ ID NO: 4847 - DNA, 456 bp, Gossypium hirsutum
  Clone ID: LIB3493-039-P1-M1-A2
acgcgaaattttgatgaatttactcgaatttcctagctttgttggggcagtgtgagagaggagatgagtatctgtttccgctgggtttcaaatatgtcttcttctactactgaaactctctccacttgcaaaacatacggttcacttccattgaagcctccgcttttctcctctatattccaccttcctcctcgtcctagatttcaactcctaatccgagctacggctgccatggaaacagatcaaagtgcagtcacaagcacgaccggcaactccacgaacccaccgatgaaactccttttcgtggagatgggtgttggttatgatcaacatgggcaagatatcacatcagcagcaatgagggcttgcagggatgctatttcttctaattcaattcctgcatttaggagaggatccatacctggggtctcatttgagcaaatgaaattactgatc

SEQ ID NO: 4848 - DNA, 429 bp, Gossypium hirsutum
  Clone ID: LIB3493-039-P1-M1-A3
ctgttacggttgcaggtaccaattccgaattcgagccacgagtcacgcgtatttggaaagattggatttttagtttcgagagttgatgtacaaagcgatgatattgagctcgtttctgtttacgatatgttatgatattgtgaatgcatgatatacatgttttagtacgatagtgtgtcacggtgaatggtagcattatgagcttaaggtgaaggacttatagaccattttctttggtgaaatggatgtcacagttttaggcatgctaaagcttgcatggatacatattttgtggattcacctgggcttgtcgctaagtttccagacgtgcgatgagacttgtttttgtggagatgggtgttggttatgatcaacatgggcgagataatacattagcagcttttgagggcttgcagggatgctatttat

SEQ ID NO: 4849 - DNA, 217 bp, Gossypium hirsutum
  Clone ID: LIB3493-039-P1-M1-A4
gtggtgtccttggcagttgagaggggatggagggagtgtgctagtcctaatgtgaggggtccacccgctctcgtattcaacttttctcagctggacgagaagctgactgctgggtacaaggccacaacagatggaaaatttacctaggctcttccgcttttcctcaacattcttcatacacttccattgattgttgttgagtcaaggagggaagttg

SEQ ID NO: 4850 - DNA, 426 bp, Gossypium hirsutum
  Clone ID: LIB3493-039-P1-M1-A5
cggacgcgtgggccaagctttttttttctccgtgaacacccaaagtaaaacgagtggagactttgagacaacatcttttaggtcccccctaaaaaagggtttgtaagagaaatggctactttcccagtgatcaacttagagaagcttaatggtgatgagagatcaagaatcatggagcaaatcaaggatgcctgtgaaaactggggattttttgaggtgatgaaccatgggattccacatgattttatggacactgttgagaggttaacgaaagaacattataagaaatgtatggaacaaaggtttaaagaactggtagcaagcaaggctcttgaaggacttgaggctgaagttacggatatggattgggaaagttcatttcacttgtgccatcttcctgtatcaaacatggttgaaatgccagat

SEQ ID NO: 4851 - DNA, 118 bp, Gossypium hirsutum
  Clone ID: LIB3493-039-P1-M1-A6
cccacgcgtccgttcaaagcttattttgtaatgggatactatatttatattgaacaatagttaagttcccccaaaagatatgggatgagaataaaaaaaaaaagttattttaactgtt

SEQ ID NO: 4852 - DNA, 269 bp, Gossypium hirsutum
  Clone ID: LIB3493-039-P1-M1-A7
ctcacgcgtacgtctacgcgttcgcaaatgtgcaattgcgggggagaatctgtatttaagattctcatgctttactggtgatgctatggggatgaacatggtttccaagggagttcaaaacgttttagatttgcttcaaaccgatttccctgacatggatgtcattggcatgtccggatacttctgttccgacacaaagccagctgcagtaaattggattgaatgccgaggcaaatctgtcgtctgtgaggccatcaggcatgttgatg

SEQ ID NO: 4853 - DNA, 383 bp, Gossypium hirsutum
  Clone ID: LIB3493-039-P1-M1-A9
cagggactctttgcgagagatctgatggtactaaaaatggcaaccaacaacttttagaggatagtcaagatccttttgcatttgatgatgatgattttgtgccttcgaagtgggatgtactatatggggaaaaaaagaaatccagaaccaaaaaacatgggaaactcgggctaagaaagagagaaatccaagatgagcatcatttccaatttaaaatgagccaacaagaatcaagtaatggggaaatttgccagagagaaaatgaagaatatcatcattctaatgcaacttcttgttctcaaagtactgaagaagaatattccagtcttctgtcagactgccttcttgctgctgtcaaggttttgatgaacttaacaaatgac

SEQ ID NO: 4854 - DNA, 447 bp, Gossypium hirsutum
  Clone ID: LIB3493-039-P1-M1-B1
ctaaattctactaccttacatagttttaatttagtattcttcaaatcctttaaaagaattctcaaacttcttcataaatttcattaaactaagcaaagcccagattttatcttcactttctctttccaaaggatctgaaaaaaaaaatgtcgtcaaatggaactgacaactcaacttctaagaagcctccaagtccttctcctttgagattttccaagttttttcagtccaacatgagaattcttgttactggtggagctggattcattggctcccatttagtggataaattgatggagaatgaaaagaatgaggttattgtcgtcgataactactttaccggcacaaaggacaatctcaagaaatggatcggacatccgagatttgagctcattcgtcatgatgtcactgagcccgtgctcattgaggttgatcagatctaccatc

SEQ ID NO: 4855 - DNA, 479 bp, Gossypium hirsutum
  Clone ID: LIB3493-039-P1-M1-B10
caacagtccccgttgagccgtagtgaatctagtgaacctcagcaactgcatccaaagacaagccattgccggcctcagtcatcccagctgcaagataatttagatattgattctgccttgaggggtattagatgtgcacttgagtattctgcccgccccacaaccaacaaatctaacaaagcagatcaggaccaattggcctctgtcaatctccagcctgagcagactccgcagagcccggaacatccacagcgcataacaaagaagaagagaggaagaggtcccactcgctgccgcttcttgaatgacttggcagatggtgagcggatttttgttcatttcaacaagtttggacagcctgttggtcctgagtcatccaagctaagcagcttcctgggcactatagcacggaatggacacaaggcaccccttaattttgttcactggagagcaatgccagattcttacaaagaggaaat

SEQ ID NO: 4856 - DNA, 302 bp, Gossypium hirsutum
  Clone ID: LIB3493-039-P1-M1-B11
ggaagactcccgtcaagaccagaaacccggatctgatccgtggtgtgggaaagtattccaggtctaagatgtaccacaagcgtggcctttgggcaatcaaggccaaaaatggcggtgctttcccccgccatgatcccaaacctaaggcccccgctgccgctgagaaacctcccaagttttacccggctgaggatgtcaagaagccgctccttaacaagcgcaaacctaaacccaccaaactcagagcaagcattacaccacggactgtgttgattttgttggctggaatgtttatggggaag

SEQ ID NO: 4857 - DNA, 366 bp, Gossypium hirsutum
  Clone ID: LIB3493-039-P1-M1-B12
agcaagtgaagatggcgaagttcaggtgttccgaaatgctcccattgatgttgagaatcacccaagtgttgttgccataaacgttagtcctattgaatacggacatgtgctgttgatccctcgaattcttgaatgcttgcctcagaggatcgaccgtgagagctttttgcttgcgctctatatggcagctgaagctgggaatccgtactttagattgggttacaacagcttgggtgcatttgctacaatcaatcacctgcacttccaggcttactacttggctgtggccttttccattgagaaagctcctaccaagaagataacctctctgaatgatggagtcatcatctcacagcttttaaagta

SEQ ID NO: 4858 - DNA, 288 bp, Gossypium hirsutum
  Clone ID: LIB3493-039-P1-M1-B2
cggacgcggggcagcaacaggtgagaggcagccaagggtatcattgtgggagattgagcctttaacaacatttccaatgtatccatctctatttcccctcaaattgaaacgcccttggcatccgggttcctcatctttgtttgataacagagatgatatatcttatgggttaacctggctaaagggaggatcttgagagcaaggactacaatctctgaaatttcaggccttctgctcatattcatggatgccgcagaaactaaatttgagtttccctgggaatgatta

SEQ ID NO: 4859 - DNA, 459 bp, Gossypium hirsutum
  Clone ID: LIB3493-039-P1-M1-B3
ttttcatgcaggattgattgaagtgagaagcaactgttggaatggaaggtgatatatgttcgggttttggtaatggaggtcaagtggatggcaaggttttgcaaacatttcaaaagagttttgttcaagttcaagacatcctagaccaaaacaggctgctaatcaacgagattaaccaaaaccatgaatcaaagattcctgataacttgagccggaatgtggggttaattaaagagttgaataacaatattagaagagtagctgatctctatgctgacctctccagctctttcaccaggtcgatggaagcttcgtccgaaggtgattcggccgggatgtacgaacctgatggaaaagctagtcagaagagaattagatctgggtaaaaatttgatcaaactgaaacttttggcataaattatgtttcctttcgctgtggaataaagggagggggtgttt

SEQ ID NO: 4860 - DNA, 482 bp, Gossypium hirsutum
  Clone ID: LIB3493-039-P1-M1-B4
ctttgaaatgtgccattgatcacattcttgatgctcaacagaagggagaaatcaatgaagacaatgttctttacattgttgagaatatcaatgttgctgctattgaaacaaccttatggtcaattgaatggggcattgctgagcttgtgaaccatccagagatccagcagaaactccgcaacgaaatcgacaccgtactaggacccggtgtgcaggttaccgaacccgacacccataagcttccatatctgcaggcagtgatcaaggagacactcaggctccgaatggccatccctctactagtcccacacatgaacctccatgatgcaaagcttggtgggtatgacatccctgcagagagtaagatccttgtgaatgcatggtggttagccaacaacccggctcactggaagaacccagaagagttccggcccgaaaggtttttcgaggaggaatcgaaggtagaagcaaatgggaatgac

SEQ ID NO: 4861 - DNA, 479 bp, Gossypium hirsutum
  Clone ID: LIB3493-039-P1-M1-B5
ctttgaaatgtgccattgatcacattcttgatgctcaggagaagggagaaatcaatgaagacaatgttctttacattgttgagaatatcaatgttgctgctattgaaacaaccttatggtcaattgaatggggcattgctgagcttgtgaaccatccagagatccagcagaaactccgcagcgaaatcgacaccgtactaggacccggtgtgcaggttaccgaacccgacacccataagcttccatatctgcaggcagtgatcaaggagacactcaagctccgaatggccatccctctactagtcccacacatgaacctccatgatgcaaagcttggtgggtatgacatccctgcagagagtaagatccttgtgaatgcatggtggttagccaacaacccggctcactggaagaacccagaagagttccggcccgaaaggtttttcgaggaggaatcgaaagtagaagcaaatgggaat

SEQ ID NO: 4862 - DNA, 487 bp, Gossypium hirsutum
  unsure (1)..(487): unsure at all n locations; Clone ID: LIB3493-039-P1-M1-B6
aaaaaaaaaagaagagagaaaaggagagggagctccggcgcgggggatatccggccagggggcatgtcatcggccgatcatcggctcgtagccggcgtcggtgcgggccaccgtacacggtggccgaaaaatcgaaaaggtgcagagggcaagcgatgaggggatggtggcgtactgcaggcactggtggccggcgcaagatgtcacacgagtgcttggggcggctaacctacggtatctagggtcagtgataatggcgggggtctagggcacactcatgctctataagtccatgcttatgctagtcccacacatgaacctacatgatgcaaagcttggtgggtatgacatccctgcagagagtaagatccttgtgaatgcatggtggttagccaacaacccggctcactggaagaacccagaagagtnccggcccgaaaggtttttcgaggaggaatccaaggttgaagccaatgggaatgacttc

SEQ ID NO: 4863 - DNA, 463 bp, Gossypium hirsutum
  Clone ID: LIB3493-039-P1-M1-B7
gtaaatctttcatttcactcattctcgggcacagcagagcagtcaaaacctcctgttaacgagccaactaaatttccagaagctccacagcccaaagaacctcctgctgtggtagctactgagtcgtcgacattagaagatattatcatgttagaagataattcaaaaaaggatgaacaagttgatggtagtggtagtccggaagtaaatgatacacctgggaaggagagttgtatggcaccttcctctgaaacggagaaagaagatgagaccatgtctttatccgatttatctaccagcttccaacagtgcttcgagtctatgaatcaaaacagaaaagcagttacagtgaagaaatcaaacgaagctagtggtgttttgcaaataaagccatttgattatgaagcagctaggaaagagattaagtttggagaagatgcagagacagaatcaggaagccatg

SEQ ID NO: 4864 - DNA, 441 bp, Gossypium hirsutum
  Clone ID: LIB3493-039-P1-M1-C1
gttgattgagaggctcatttatgctgagggagcagagaatggcctcgagttcaccattgtgaggccatttaactggattggaccaaggatggacttcattcccggcattgatggtccaagtgagggagttccaagagttctagcgtgctttagtaataatctccttcgccgtgagccacttaagcttgttgatggtggccaatctcagagaacttttgtttacataaaggatgctattgaagctgttctgttgatgattgaaaacccaggcagggccaatggtcacattttcaatgtgggtaacccgaacaatgaagttacagttaggcaacttgctgaaatgatgactaaagtctataccaaggttagtggagaatctgcactggagactccaacaattgacgtcaggtccaaggaattttatggcgagggatacgatga

SEQ ID NO: 4865 - DNA, 297 bp, Gossypium hirsutum
  Clone ID: LIB3493-039-P1-M1-C10
ggaaaacctacgcatcccaggaggagcacgatgaccgactgggagtcttcaaggctaacctgcgtcgggccaagcgtcatcagctcctggaccccagtgccgtccatggcgtcacaaagttttccgatttaactccatcggagttccgccgccagtatctaggcttgaaaccgctcaagctcccagccgatgctcaaaaggctcctatccttccgactgacaacttaccggatgactttgactggcgtgaccacggcgccgtcactggcgttaaagaccagggttcctgtggatcgt

SEQ ID NO: 4866 - DNA, 369 bp, Gossypium hirsutum
  Clone ID: LIB3493-039-P1-M1-C11
cggacgcgtgggtgcaaaacttcatgctcagggtctccacaaaaaattgaaaaaaaaaaaccccaccttttttcctttcaatttgcacaacacaatctcacatcgtatcgacatctaaaactcaaaagagtctgtcatttcccttacttcctcaaaccagaagccatggccagcatgataatggcttcctcaaagcctgtaatctccattgctgcttcatcatccttcttttccaaacccaaactcaaacaaatcccacaactttccctcccaaaactcccctccccaaagttcttgaaaacccaacaaatcccctcactctcctccaccactctcaaatctatctccctcttcacagtcaccacttta

SEQ ID NO: 4867 - DNA, 372 bp, Gossypium hirsutum
  Clone ID: LIB3493-039-P1-M1-C12
cttggctgcaaagggtgaagagtctaatcaatgtgagaaatttgccaaatactactgttctctttgtcctggtgaatggattgacaagtggaatgaacagagggagaatggtactttcccgggtcctctgtgactgtgatcacatattggaaagtaggtgaagcattgcttctttggcatggaaaacttgtcttgtagctagtttcaatggtttttcttgaaaatttcgaattaataagctacaaatggaaatttgtggccgatgagttgttaaaaaactggaatatgctctgatgttttaattcatgaacctgcttttttcagcagattgtttcatcttcatttacattttagtggggtgggattaacttt

SEQ ID NO: 4868 - DNA, 471 bp, Gossypium hirsutum
  unsure (1)..(471): unsure at all n locations; Clone ID: LIB3493-039-P1-M1-C2
aggtcactcatctccatctgatgctcctaaagtgtacaggttatgtatagtgttccttacttttagctgtattggatatgccatgccattcatactatgtgcaacaatttgttgctgcttgccctgcatagtttctatccttggtatccaagaggatttttcaccaaccagaggagcctccagggaaattataaatgcattgccgacattcaaatttaaatccaagaaaaccggaaatgtaaacaatcaggaaatttcagctagtgaagatggggtcctggctgcagggacggcaaaggaacgtgttatatccggggaagatgcagtttgttgtatttgcttggctaaatttgcagatgatgatgagctgagggagctgccgtgcctncatgtcttccatgtggagtgtgtagataaatggttaaaaatcaatgcgtcttgtcccctatgtaaaaccgaaattagtgagag

SEQ ID NO: 4869 - DNA, 464 bp, Gossypium hirsutum
  unsure (1)..(464): unsure at all n locations; Clone ID: LIB3493-039-P1-M1-C3
atgcagcaccctctaaaacaccaccttacccggaccgttttagctttaatcttactttctcacttcccaccagcttcccccgtcaccccatgccgcaccgtatgtggcaccaccgccataaattaccctttcagcatcgacgacggctgtggcgccccacaataccgctcaatgctgaactgcacaggtaccgaactgtttttcatgaccacttcggngcggtacaaagtccaatcaatcgactacaacaaacaaaccatggtggtttacgaccctgccatgtcgacatgttccattcttcagccccaccatgatttcgttatgacggacgttgaatccgtcgtgataccgcctagttccgacaccgtttttgcccttctcaattgttctatcgactcgccggtgcttaaccggtacaagaacctttgttttaacttctcagggcattcgtgtgatgagcttta

SEQ ID NO: 4870 - DNA, 446 bp, Gossypium hirsutum
  Clone ID: LIB3493-039-P1-M1-C4
caattatgtaaatttagtgccttatactctgatccatcgtctttaactttctttgctcattttcctggaaaaaaaaaacgaaaaagaagttgttcaacatgaacatcttctatcttcgctaaacctttttatctttactttgaaactcacaaaatcatgtaatttacatgatcgcaggttcaaaactctcgtttgtttccaatagctgatattcttgatcattttcagtctttttttcttttacctcacttagaagattattgaaggaagagggaactaaagccagttgtttagagtttcgataaaaactaaccatggaggagacctttgtgcctttacgaggcatcaaaaatgacctcagaggcagattgatgtgttacaaacaagactggactggtggctttaaagcaggcttcaggattctggctcccaccacttacattttc

SEQ ID NO: 4871 - DNA, 480 bp, Gossypium hirsutum
  Clone ID: LIB3493-039-P1-M1-C5
caaattaccactccagttcccattacctttcgctgtgggatattccctccctgtcaaatttatttccaaaactggatcaagaaattccccactgcccctactttccattagactgttgacatttgccccctattatgcctttccccattacttcctctcccttgtccctcactttcttcttgcaaccaaacacttgtcattgtttgagctcgatgagattgcgccctaagtgataaatcccaccccatctctttagcttccacacctagctccatccttgcttcacaaaaggaatcactatggcccaaactaccacaataaaagcaaaaaagtgagtctttcatatctaaatcgaacatatgagcattttccatagcacattatttgttttttcctttttaatggacgccttatatcaattctcacacgaatcctcatgaagtttttaccttctttccccatatttgatccatcatattc

SEQ ID NO: 4872 - DNA, 448 bp, Gossypium hirsutum
  unsure (1)..(448): unsure at all n locations; Clone ID: LIB3493-039-P1-M1-C6
gaagataataaagcgtttgtctcagatttctgaagatggcccgtaccaagcagacagcccgtaagtcgactggtgggaaggctccaaggaagcaacttgctaccaaggctgcccgtaaatctgccccaaccaccggtggtgtgaagaagcctcatcgctaccgtcctggaactgttgctcttcgtgaaattcgaaagtaccagaagagtactgagcttcttatcaggaaattgcctttccagaggcttgttcgtgaaattgcccaggacttcaagactgatttgcgtttccagagccatgctgttctagctctccaggaagctgcagaggcataccttgtgggtctttntgaagacaccaacctttgtgcgatccatgccaagcgtgtcacaattatgcccaaggacatccagttggcttgtaggatcaaaggagagcgtgcttaatt

SEQ ID NO: 4873 - DNA, 440 bp, Gossypium hirsutum
  Clone ID: LIB3493-039-P1-M1-C7
caaatacatcaagaagattagcttgcgagagtagatcgtttaacttctatgataggattggaggaatgtgttgctctagaagagttatatttgagccacaatggcatttcaaaaatggaaggtctatcaacattggttaacctccgagtattagatgtttcatcaaataagctaacatcagtaaatgacgtacaaaacttgacaaggttggaggacttatggctcaatgacaaccaaatagaatcacttgaaagcgtagctgaggcggtttctggttcaagagaaaagctcaccactgtctatcttgaaaacaatccatgtgcaaaatctccaaactaccaagctaccctgagacaaattttccccaatatcgagcaaattgattcaagcatatttgcctagaagtttttacagttctgactggaatgttggtgcttaaa

SEQ ID NO: 4874 - DNA, 476 bp, Gossypium hirsutum
  Clone ID: LIB3493-039-P1-M1-C8
agttcctaaatcgtcacctttcggcaaaatgggtccatgacaaggagagcatgcaccctttgctcgaattcctcagagtccattgccacaagggcaagaacatgatgttgaatgacagaattcagaacttgaatgctcttcaacatgttttgaggaaagcagaggagtatcttggtaccctacctcctgagacaccatgtgccgaattcgaacaccggttccaggaaatcggtttggaaagaggttggggtgacaccgcacaacgcgtgctcgagatgatccaactccttttggatcttcttgaggcacctgatccttgcacccttgagaagttccttgggagaatccccatggtgttcaatgttgtgattctcactccccacggatacttcgctcaagacaatgttttggggtatcccgacaccggtggccaggttgtttacatcttggatcaagtccgagctttggagaatgag

SEQ ID NO: 4875 - DNA, 507 bp, Gossypium hirsutum
  Clone ID: LIB3493-039-P1-M1-C9
ctaaacccctgcgcgctccggtaccaattcccattccacccacacctacgcttccgattcaatatataagaaaacttacgctggaccggctcacaataaggtgaacaatctccctcaactctaccttctaaatcttcaatatcacttgcccattcacgttctacatactgatctaagtctaaactccaatgctaccattccaaatactaatattcataaagagtattttgcccagcaacatcacaacacacctagagctcatctagattacgaatcctcatattgcaagttacatccaaacgacactattctcaatcttcagaccacaataccttactacatgaaaaacctagcacatatttccactatctatgtccggcgtgaatgtacaataggtactgactgcccttataaccatgagatgccctaaactgccgacttgtcccatcaaaatataaaacaccgtcacttatccgtgaatgatccaattgcactaaacctacttaa

SEQ ID NO: 4876 - DNA, 464 bp, Gossypium hirsutum
  Clone ID: LIB3493-039-P1-M1-D1
gtcgagatgcaaggtataagaaaactgaggtttgtcagacttgcagtaagttgaaaaatgtgtgtcaagtctgccttttagatcttgaatatggattgccagttcaagttcgggatactgctctaagtataaactccaatgatgccattccaaagagtgatgttaatagagagtattttgccgaggagcatgacaggagggcgagagctggtctagattacgaatcctcatatggcaaggtacgtccaaacgacactattctgaagcttcagagaacaataccttactacaagagaaaccgagcacatatttgcagtttctatgtgcggggtgaatgtacaagaagtgctgagtgcccttataggcatgagatgccggaagctggggagttgtcccagcaaaatataaaagaccgttactatggggtgaatgatccagtggcactaaagctacttaacaaggct

SEQ ID NO: 4877 - DNA, 344 bp, Gossypium hirsutum
  Clone ID: LIB3493-039-P1-M1-D10
aaccacctttctgagttaatagacagtgggcatagttttccatgttccctttttatcgttaatttcttatgtcctttatatatcctattggtattttattttaattcttttgctcatctttagtccaagatgattgtctcttattaccatatacttttgctttataccaagtgaacaaaacagaaagaaacaatataatacaagaagtttgatattaccttttctaaaattatgagtccataggagtttgacatcatcaaacatgcaattttatggtttctggtagaaatgattttttgtggtttattggtagaatgagaaaatggcttgctaggtgtttttta

SEQ ID NO: 4878 - DNA, 391 bp, Gossypium hirsutum
  Clone ID: LIB3493-039-P1-M1-D11
accactctttctcttcatctcaaaaggtggaagttcaccgacaaagctttttcccctcacggtcgagctctgaaatggcaaccgagaataacagttccagggtcggatctggatccggatctcattctgtgaacggcgacgcggctcctgaccgcaagatcgcgttgatcactggcatcactggtcaagatggatcctacctgaccgaattcctcctcaacaaaggctatgaagtccatggcttgatccgccgctcttccaacttcaatacgcagcgtatcaaccacatctacattgatccacataacgcccacaaggctcggatgaagctccattacgctgacctcaccgacggcttctcgctttggcgctggctcgatactattcgacc

SEQ ID NO: 4879 - DNA, 490 bp, Gossypium hirsutum
  Clone ID: LIB3493-039-P1-M1-D12
ggcaatacataaccttcaagaaagagtacgatggacttcttgtacttcttagggagcttgtgaataatgcagtgcgctttgaagaaatactttctggatcaacttcagggcttacccatgttgatgtgaaaatggcagatctacaagccaaggctgaagaatatgaaatcactaatttggaggccttcttttctagctccgactttagagctcattatgagttggacgaacaaagaagagttattaggcatcaccttgtatatgatgacaaaccatagctgcagcatttctacatgagagataagctttagcggtggcaggcagcagattgcaagaagacataccccggtttcagcaatcgtggtaggaattgttggccactagcagatggatatataatatgctaatttcttagcaccgaaatacttttgtactaggtagccatattttacttgatgaccaaatctaaattgacattttgtctaattta

SEQ ID NO: 4880 - DNA, 72 bp, Gossypium hirsutum
  Clone ID: LIB3493-039-P1-M1-D2
gaaaatttatgcccatcttcaagtagtgaggagcatttggtgctcctgcaaacctcatatttgggtagaata

SEQ ID NO: 4881 - DNA, 454 bp, Gossypium hirsutum
  Clone ID: LIB3493-039-P1-M1-D3
ttgacatattgacagcatgtcgggactcgaagtggaggaaatttctacctcaacagcttctttggagaggcttccagggaagtcaacctcatcatcccctgcggttgccgccgatggttcaactcacgaatctttctcttattctaagcttcctgaagagaccctcaatctctccattcgcaaattggatggctcttcctttgttattgaagttttaaagtcggctaccgttgcagatctcaagctgggagtccagaatgtcttttgtcatatgccagacgaaggtcctgacaagatttcatggggacgtgtttggggacactttcgcttgtcttatggtgatgtgaagttgatcacagacgctgatcttatcgaaaagtatggcattaaggatgatgatcagcttcatttcactaggcatatctcgacaaaggttcaaaaagttaaacagact

SEQ ID NO: 4882 - DNA, 438 bp, Gossypium hirsutum
  Clone ID: LIB3493-039-P1-M1-D4
gtagatgtgggcaataatgattatctccccacgatctggagggctaattaccctccttatgggagggacttcgccaaccaaaagcctaccgggaggttttgtaatggaaagttggccactgacatcactgctgaaactctggggtttactacttatccaccagcatatttaagccctgaagcatcagggaacaaccttcttattggagccaattttgcttctgctggatctggctatgacgacagagctgcctctttgaatcatgctatcacgttgagtcagcaagtagagtatttcaaggagtaccaggcaaaactagcaaaggtagctggtagtagcaagtcagtatccatcatcaaggatgcactctatgtattgagtgctggaagcggtgacttttttcagaactactatgtcaattctttgggtaaccatgcc

SEQ ID NO: 4883 - DNA, 575 bp, Gossypium hirsutum
  unsure (1)..(575): unsure at all n locations; Clone ID: LIB3493-039-P1-M1-D5
taatacganctcactatagnggaaagcctggtaccgcgctgcgaggtaccccggtccggaaattccccgaggtcgaccccacgcccgtcccgcccaccgcgtcccgcttaaattccccttttgcaggcgagactcggagattgggaattgtgtgcccatatagtnnccccttggtcaatgnngtttctttgcccnnngtaaagcgaaggggaggataccccgtctaagtagttctctttgcggagtcgtgtcccaaggggtgttcaaggggagaaaaccttcggagccacaaataaggatccctatatctcgaaacggtagagagagttgagctggaaagctatggatgtaccaccggcaccaacttgcactgtgcctgggttcttcatcaagggggatgatgnttnntctcctattcccggaacaacccaagagttaaaaatctagaacagcaaccattgaatcagtcgaaagtaaaagctgacanaaagaagatttgaaaggaaattacagaatgcgatcccaatccatgaggttgcagggggtacttatcctgaagggttaaagcaattcac

SEQ ID NO: 4884 - DNA, 406 bp, Gossypium hirsutum
  Clone ID: LIB3493-039-P1-M1-D6
gttgggcgctaatgtcgacctctttttcagagaggagcgtgctttgagagggtttgatgatcaaatgatggcactgtttactagaaatctgggaggaaggggaattgatttgcatccacagacgaatttgactgagttcattaaaacagataatggcataaaagttactacagaccacggcgaaaagtggatagcagatgttgtactctttgccacacgcaggttaccaaactctaagaggtttaatctggaagctgtatgtgtggaacttgataacacacgagctgtgaaagttgatgagtactcacgtactaccattcctagtatatgggctgttggtgaccttacaaatcggatgaacctaacttctgtagcctgaatggaacgaacctgccttgcgaagact

SEQ ID NO: 4885 - DNA, 188 bp, Gossypium hirsutum
  Clone ID: LIB3493-039-P1-M1-D7
cggacgcgtggtcggacgcgtggggagggaaggagagatggcggctgtaataaaatctgcaatcttaattctgtcagtgtttttatgtgtacgcttcagttcggttgttaagctgctctaagaacagactaatgagaaccctataaacatagaggctgttattaagattgatgcactcagccctaccg

SEQ ID NO: 4886 - DNA, 280 bp, Gossypium hirsutum
  Clone ID: LIB3493-039-P1-M1-D8
ctagagattgtcatctctctcacctatggcttggggtgttcaagaaagacgggagctaaaacctaaaacacatatgatatctcttattgccatactgcaggactcgatttcttctacgtccatcttatgtctgcatatggtgcatcatacaaatataatgctgatcgatgtgatataaaagagctttaataatctcatggaagcgggagcatccgcagtgctccatcttcaatgataaagctcgagatctaaccctgccacaccctaatgctaatgcagc

SEQ ID NO: 4887 - DNA, 458 bp, Gossypium hirsutum
  Clone ID: LIB3493-039-P1-M1-D9
cagggatctacacatacatacgtcaacgggcagtctacttcgaggcatggttcgtacgtaacgacaaaagatcgcgccttgccatcagtagttatctcgaagactacatcaacaaggtggagactggttcagttcaatctccacacatacgattacacgactgacatccggttagacatagatcacccttacagctctaccaacctaatgttctctgctgcctaggatacctgcaatcccgatatgtatgccacgttctgcgactaccttcgtctttgggaaatccacgacgatcatatcgagcttaagtacttgcttaatggcaacaagagcagcgaattcaattctgccataacttccttcgattgggctgatttcgacacccgccgtgtggccacctacagtgtcgacactacttgtaccatttgggacattgagagcgaggctgtagacactca

SEQ ID NO: 4888 - DNA, 438 bp, Gossypium hirsutum
  Clone ID: LIB3493-039-P1-M1-E1
tttattttttaatttacattatttttagattactggcgtttcttttccctatttattcagctatttttaggtcgttattatacgaggcttgtgggcggatagtgaacccgatatacggttctgtcggcttattatggtccggaagctggcagctttgtcaagccgccgtagaagctgtgctaaaaggtgctccgatcacgccgattgcgtcagaagccgctgcgaatggtcaagggccgcctctaaaagcttacgacattcgtcatgtttccaaagatgaaaactctgcagcctctaacgatgtccaacgagttaagacccggtgccgagttaaaagaactttgaagccgaaggtgaataacccggtcttagaggaggagaaccgcagctcggaaccacccgaaccgcggtgttacgcggatgaagggttcgagggaa

SEQ ID NO: 4889 - DNA, 320 bp, Gossypium hirsutum
  Clone ID: LIB3493-039-P1-M1-E10
cagaggtctcatcgctgagaagaacgtgtgctgcactcatgctccgtctagcgtggcactcagctggaacttttgatgttaagaccaagacaggaggtccattcggaaccatgaagcatcctgctgagctcgcacatgctgctaacaacggccttgatatcgccgtcagacttctcgagccgatcaaggagcagttccctaacctcacctacgctgacttctatcagctcgctggtgtcgtcgccgttgagattactggtggacctgaaattcccttgcatgccggaagagaagacaagcctcacccaccacctgagggc

SEQ ID NO: 4890 - DNA, 424 bp, Gossypium hirsutum
  unsure (1)..(424): unsure at all n locations; Clone ID: LIB3493-039-P1-M1-E11
ctcgccgtctcgcctctcgcttattggttcaggatctatcgtataaaaatatcaaaacatgtttgggagagcaccgaagaaaagcgataattccaaatactatgagattttgggagtatcgaaaaacgcttcccaagatgatctaaagaaagcttatagaaaagccgctattaagaatcatcccgataaaggcggcgatcctgaaaagtttaaagagttggctcaagcttatgaggtgctgagtgacccggagaagcgtgagatttatgatcagtatggtgaggacgcccttaaagaagggatgggcagcggtggcggtggccatgaccctttcgatatcttccagtctttctttggtggcaatccttttggtgctggtggaagcagncggggcagaagacaaagaaggggggagggtgttatc

SEQ ID NO: 4891 - DNA, 160 bp, Gossypium hirsutum
  Clone ID: LIB3493-039-P1-M1-E12
aggaggtgtcgcacgagtggtcttgggtgaaggaacaaaagcccatctggatgaggaagcctgaggagattaccaaggaagaatatgctgctttttacacgagccttacaaatgactgggaagagcatctggccaacaagcacttatcaaaggtggtaca

SEQ ID NO: 4892 - DNA, 52 bp, Gossypium hirsutum
  Clone ID: LIB3493-039-P1-M1-E2
tgggacattgaagttagtgagttaaagcgtgacaatatgggtgaggaagatg

SEQ ID NO: 4893 - DNA, 419 bp, Gossypium hirsutum
  Clone ID: LIB3493-039-P1-M1-E3
ataatacaatacaccattttcccgaactgaatccaaatccctaaaggctcaaaaaagtcgttttttttcctaatctaagaaagaagaggaagaatcaagcttggttttctctcagaatgtcggaggcaccattcagacctagggaaaagcttatcgagtatcagaaatattttcaaggcatccaaaaacacacttacttgaaaggtcgttacgataagatcacatctgtcgccattcccgctgctctagcagcaagttccctgtttttaatcggacgagggatctataacatgtctcatgggattggaaaaaaggaatgagagctctcactcatggttagaagacatgtttttctttttttgggtttcattttagcatgaaattgcttggttatttgctctaataattggttgggtttt

SEQ ID NO: 4894 - DNA, 476 bp, Gossypium hirsutum
  Clone ID: LIB3493-039-P1-M1-E4
ttcatttctgaggtggctttgctttttcatttgaggcaggccaatattatcacttttgttgcagcttgtaagaagcctcctgtgttctgtataatcaccgagtatcttgcaggtggctcattaagaaagtatttgcatcagcaggagccatattcagtcccacttaatttagctctaaaattagctcttgatattgcacgtgggatgcagtaccttcattcacaaggaatacttcacagggatctcaaatcagaaaatttactccttggagaagatatgtgtgtgaaggtggcagattttggtatttcatgcttagaatctcagtgtggtagtgcaaagggatttacaggtacttatcggtggatggcacctgaaatgattaaagagaaacatcatacaaagaaagtagatgtttacagttttggcatagtcctttgggagcttttaacggctttgacaccatttgacaacatgac

SEQ ID NO: 4895 - DNA, 327 bp, Gossypium hirsutum
  Clone ID: LIB3493-039-P1-M1-E5
caggattactaccctggctttgcttacagctgggcgaggatccattggtgggcccagcttcaccactccagcaacagcaccacaaagcctgctctgttgctgccaacattgcgatttggagtcgagcagaatcattggatgaattagctactgtgttcatggcttactctggaggtgagattacaagcattgagaatctcctggcctgcgtctcaccaatgatgagcgaagaatggcagcctatgcactcacctataactactggacactagaaacagttactggagagaggcccattttaatatcaactacttaaaatgctaatgc

SEQ ID NO: 4896 - DNA, 241 bp, Gossypium hirsutum
  Clone ID: LIB3493-039-P1-M1-E6
ggaagcacccgtgccgaccgagattgaacttgggccagtggcttaaagccgatgatgactgttatgatagtcatctatttgatatttggagcatgtcaagtgtcttagattttgtagtttttaagtttggcacctaaaatgaacttatgctggatgctcttttatgaattttcctttggtgtttctcaaattttgttatacttaaaacttattacttgataattttattcaaggatttttt

SEQ ID NO: 4897 - DNA, 63 bp, Gossypium hirsutum
  Clone ID: LIB3493-039-P1-M1-E7
gaaagatttaaaaagaaaaaaagagacatgctctgtaataaaatgtgcatcttaattctgcgg

SEQ ID NO: 4898 - DNA, 330 bp, Gossypium hirsutum
  Clone ID: LIB3493-039-P1-M1-E9
aaaatgttcttgcccttagaggtgacgctgctgatggtcaggacaagtttgttcaagtcgaaggcggcttctcttgtgccctcgatttggtgaaacatattagagctaaatatggtgacttctttggtataacagttgctggttatccagaggctcatcctgatgctattggaagtaatggtgtagcaacaccggaagcttatcagagggatcttgcttacttgaagaagaacgtggatgcaggagctgatcttattgctactcaaccgccctatgatggtgaggtgattctgagactcactaattgttgaccacaaactgggattgcct

SEQ ID NO: 4899 - DNA, 454 bp, Gossypium hirsutum
  Clone ID: LIB3493-039-P1-M1-F1
caggaatgaaaattacaacacggcagattggactgggcgatgatccaacagatgcagcatgtttgtcctgaatgcagaggctcaggtgagatgatcagtgatcgggatagatgcccacagtgcaaagggaacaaggttactcaggaaaagaaggtgctggaagtacatattgagaaaggaatgagagatggtcagaaaattacatttgagggacaagctgatgaggctccagatacaataactggagacattgtttttgtaatggaacaaaagaaacaccccaaatttgataggagatttggggacgaactttatgttgaccacaaactcagtttgacagaggctctatgtgggtttcagtttgccctaactcaccttgatggcaggcagctcttaattaaatcaaaccctggcgaggtcgttaagcctggtcaatacaaggctatcaatgatg

SEQ ID NO: 4900 - DNA, 431 bp, Gossypium hirsutum
  Clone ID: LIB3493-039-P1-M1-F10
cttcttgctccggatgggacaacgtagacctcgtggttgtctcttccccagagctagccaaagaagttttgcacacccaaggagttgagttcggttccaggacaaggaatgtcgtgtttgatatcttcacggggaaaggacaggacatggttttcaccgtgtacggtgagcactggcgcaagatgagaaggatcatgaccgtccctttcttcaccaacaaggtcgtgcaacagtacagacatggatgggaagccgaggttgccagtgtggttgaagacgtgaagaagaacccaaaagcggccaccaatgggattgttttaaggaggagattgcagctcatgatgtacaataacatgtctaggatcatgtgtgataggaggttctaaaggaaagaagagtccttgatgggtaagctcaaggatgtgaatgga

SEQ ID NO: 4901 - DNA, 447 bp, Gossypium hirsutum
  Clone ID: LIB3493-039-P1-M1-F12
gagagatcgagatcgccttctcaggcttttgtgccctaagaattctcacttttctcgctgtaaataagtgcaaaagtcggtgaacttttggggacgtgttcttactgaggttcagagccttcattcgaggattcttgttcttccttagcatggcaaccaatgaaaatcttccaccaaatgttataaagcaactggcaaaggaattgaagggtcttgacgaatcacctccggaaggcattaaagttggagtaaatgatgatgatttttcgatcatttatgctgacattgaagggccagctgggactccatatgaaaatggtgttttccgtatgaagttgttactgtctcatgatttccctcattctccttcgaaaggctactttctgaccaagatttttcatccaaatattgcacccaatggggaaatcttgtgaaacaccctaaaaa

SEQ ID NO: 4902 - DNA, 447 bp, Gossypium hirsutum
  Clone ID: LIB3493-039-P1-M1-F2
cagcatatgacattgtggatctccttttgccttgagtctggaagaaaccatcagcttatcgaggccagcatatgtgcactcataaagtgggcaaagaccgcacgccactcaaatcagacatggtcaaagctggagttattgataactgtcttgaggtactccctcttgcgtccagttcattgtcatcctcaatcgcagagttgttccggattttgacaaatagtagcgccattgctagaagttcagatgctgcgaaaataatagagcctcttttcatggttttacttcgaccagatttcggtttgtggggacagcacagtgccttgcaagcacttgtaaatatcttggagaagccacaaagccttgcagctctgaaattgactcccagtcaagtcattgagcctctgatttcatttttggaatctccatctcaagctatttagcagc

SEQ ID NO: 4903 - DNA, 286 bp, Gossypium hirsutum
  Clone ID: LIB3493-039-P1-M1-F3
acgcccacgcgtacggtttctgaaaaataccataggtgatagggtgtttcttttcacttttttaataataagaatatatagtaatggggagaggaagagtggacttgaacaggatttacaacatgcatggtcaacagttgacttatgcatatatgattaatggtactctaactagggattatgagattgtaatgcttaatcatacagttgttgcttattttgacatatagtatcgcggttgttagaagcacacatgctgcgataataatatagtttatatacatgg

SEQ ID NO: 4904 - DNA, 464 bp, Gossypium hirsutum
  Clone ID: LIB3493-039-P1-M1-F4
ctccttacagcaaatttcaattggctccctacgaacgagagtactcgataggctcatttgaattgctcagtcaaacagctccaatccaagctctgtctcttttgttgttcggtccctttgttgattactacctcactggcaaattactagcaagttacaagttctcctcagctgcattttttttcatactactatcgtgctcgttagcggtattttgcaatataagtcagtatctttgcatcggacgattctccgccacatctttccaagtcctaggccacatgaaaacggtttgtgtattgatattgggatggctactctttgattcggagctgacactgaaaaatatactcgggatggcgattgccatcctcggcatggtagtctacagttgggctgttgaagctgataaacaaacggaatccaaggtttcaccactccccaaggaagcttctgaagaaaat

SEQ ID NO: 4905 - DNA, 146 bp, Gossypium hirsutum
  Clone ID: LIB3493-039-P1-M1-F5
atgatcgctagttgtggtcaagcacaataacgtattggcggacatatggtgtttacgtattttatgtgtataatatagtaaatattacacttcttttctatctcatttttcttaaaaggaaattggtgctttcacaattcacagtt

SEQ ID NO: 4906 - DNA, 470 bp, Gossypium hirsutum
  Clone ID: LIB3493-039-P1-M1-F6
aaaaaaagagagatggcgtctgtaataaaatgtgcagtgcttaattctgtcggtgtttttatctgtacgcttcagttcgggtgttaggttgctccaggaacagcccaatgatgaccccaaaaacatggacgctattcctcccattgatgcactcaaccctaccgagttgaatggacccggtgttggcattcacgaagatcatgttgtcccaaaaggtgctgaaattggtactcttggttttggttttgaaggtggtcctgataaatgttgttcttctggatgttccggtaattgtaatcctggtggtttcgttctaccatttcctcaaattccagaaatcccaagaattccagaaatcccacaaatcccacagatcccacaaatcccacaaattccactaatcccacagatcccacaagtcccacagatcccacaagtcccaaaaatcccactaatgccaggacaagtcg

SEQ ID NO: 4907 - DNA, 296 bp, Gossypium hirsutum
  Clone ID: LIB3493-039-P1-M1-F7
ctaactttgttgttaattgtgggtgtttggagagaacgatttgaaggaaggaaagtctaacaagatgcaggttctcttctattattctcaaatcaccttgtatttgcccacagcgcatacggaacaggcgcactcatgaacaacaggccctgcaagctcatattgacaaacgcctgataagaacccacaaacttacatttcaaccaccagctgatgaggctccacatacaatatccggggacatcttttttgtcatggaacaaacacaacaccccccacttgctgcgtcctttttt

SEQ ID NO: 4908 - DNA, 448 bp, Gossypium hirsutum
  Clone ID: LIB3493-039-P1-M1-F8
attttataaacaacactgatctctacttgaggggacttctctactccaatgtcctttgcacttcttcaaagaacaacgaatgttcaggcaaagtcgacatcaagtattacaaggtgccaggttacaacatgaccggaccggctatcatgaacggaaagaaaaccggaaatctctatccggctttcaccagagtcaaccatggtaaatatgcggcgagtgacgtacgtggtcacattagcaccagcaatctgatatgggattatttctacacaacagccggtgttagcttcggaacgtataatccggccattgttgctcagcttcaagaaatcttcgatgcagattggaattctccatatgctgttccagttgaggggttgagtgatggtcatgcttgttctagttgatctagttccctcaaaacactgaaatcaatggctttgtaata

SEQ ID NO: 4909 - DNA, 429 bp, Gossypium hirsutum
  unsure (1)..(429): unsure at all n locations; Clone ID: LIB3493-039-P1-M1-F9
agcgtccgggaacagagagcaagagaaaatgaaganagtctctatcagagaccatggatatccccgatggggtcaatatcaaagtgaaggctaaaagatcgggttgaaggtcccaggggtaagctcactcgtaacttaagcacctaacctcgatttcacctcacaaggacgaggagaccggaagcgtagctaggatcgggcctggtcggaccaggaagccagcgctgcatccgtaccgcctcagccacatcgagaatctcatcaccggtgtcaccaaaggttaccggtacaagatgaggttcgtctacgctcactttccgatcaacgcctncatcactagcggcaacaagtccatcgagatccggaacttccttggcgagaagaaggtgcgtaaggtggatatgttggaaggggttgccattactcgat

SEQ ID NO: 4910 - DNA, 263 bp, Gossypium hirsutum
  unsure (1)..(263): unsure at all n locations; Clone ID: LIB3493-039-P1-M1-G1
gaaacatgttggtgctagatacccanaagctaatctaggtgctgttggttggtctctgggtgcaaacattcttgttcgatatcttggtcaagaatctcatgcttgccccctttctggtgcggtgtcattgtgtaatcctttcaatttggtcattgctgatgaggacttccacaagggctttaacaatgtttatgacagaactcttgctagaggcctctgtaaaatattcaagaaggatgctctcctatttggagatatggggg

SEQ ID NO: 4911 - DNA, 354 bp, Gossypium hirsutum
  Clone ID: LIB3493-039-P1-M1-G10
agaagactcaaagaggaagcttaccggcctcagaacttcctcggagcctgtggtactagtggcgggctagttccaacccctggtggaggtgttggccttaatttagggccatcagtcttttgttcctatcctgggaccggatgtgttcgtgtccagcctactatccctggtagtactggtaccattggcgctggcacaccaccatgatagatgtcctgattcaggcttagagggtgttgaatgagcttcagttatggaggtctaagccgttgtctctgtagtttggtattttttagtgtgtgtttgattggaccaccttaatgttttgggagctgctaatgaccatcctttgtg

SEQ ID NO: 4912 - DNA, 424 bp, Gossypium hirsutum
  unsure (1)..(424): unsure at all n locations; Clone ID: LIB3493-039-P1-M1-G12
gtgaccttgggttgagtgtagagatgaggaaagtcatgggtgccaaagttctcttcttctttgctttgctttccttttcagctgtgtcggcatttgcacaggatgaggaagaccaaggtcttgttatgaacttctacaaggattcttgtcctcaggctgaagacattatcaaggagcaagttaagctactgtacaagcgacacaaaaacactgctttttcttggctgagaaacattttccatgactgtgctgtccagtcatgtgatgcttcactgctgctggactccacaagaaggagcttgtctgagaaggagacagacaggagctttggcctaaggaatntcaggtacattgagaccatcaaagaagctttagaaagggaatgtcctggagttgtttcttgtgctgatatccttgttctgtc

SEQ ID NO: 4913 - DNA, 161 bp, Gossypium hirsutum
  Clone ID: LIB3493-039-P1-M1-G2
cgccacgaaggagccatgtttggggacaaaacgagtcggggaagttgtggttcctttactggatctgatccaagagtctaataatggagttgttagatttgtgacttaccatgtacggactacggatggcaaagcatatggagagttgaatctctctttta

SEQ ID NO: 4914 - DNA, 138 bp, Gossypium hirsutum
  unsure (1)..(138): unsure at all n locations; Clone ID: LIB3493-039-P1-M1-G3
caaaaactaaacaggctttctttctacatataagaaatggatgaaaacactgncaagggngttcaattaaacttttaaaagttcttcattatttgggtttaaaaattttctcttttcttttaaaaaaatggggttggg

SEQ ID NO: 4915 - DNA, 442 bp, Gossypium hirsutum
  Clone ID: LIB3493-039-P1-M1-G4
cgatatttctggctctgaggtctcctgaagtggaggtggtcggactcaccactatttatggcaatgtctacactactttggccacgaggaatgccttacatttgctagaggttgcagacaggactgatatccctgtggcggaaggatcacatgttaccatcactaaaggtacaaaacttcgtgttgctgattttgtccatggtgctgatgggcttggcaatcaaaatttccctcccccggaaggaaagcctattgacatgtcagctactgatttccttgttgagcaagcaaacctctatcctgggaaggtcactgtggtggcattggggcccctaacaaatattgcactggctattcaacaagatccatcgtttgttaaaaacattgggcagattgttcttcttggtggtgcttttgcagtaaatggaaatgtgaatccagc

SEQ ID NO: 4916 - DNA, 400 bp, Gossypium hirsutum
  Clone ID: LIB3493-039-P1-M1-G5
ggacgctattcctcccattgatgcactcaacggtaccgagttgaatggacccggtgttggcattcacgaagatcatgttgtcccaaaaggtgctgaaattggtactcttggttttggttttgaaggtggtcctgataaatgttggtcttctggatgttccggctattggaatcctggtgggtgcggtctaccatttccatagatcccatagattccaagaattacagaaatctcacaaatcccacagatcccacaaattccacaaatttcactaatccgacaggtccgacaagttccacagatcccacaagtcccaaaaatcccactaatgccaggacagtctggatgtgagagtggaaagtgttgccgtcagggttgtggagggacttgtgctgagtgt

SEQ ID NO: 4917 - DNA, 458 bp, Gossypium hirsutum
  Clone ID: LIB3493-039-P1-M1-G6
cagctttgggatcaaagttggcaaactgcagtggtgatggagaatcctagtttcactcttttacttgtctgtgccttgtgcatgtcctcagtggtacaatgcaaatacaactgccccgaaaagtacgatccccatgatatgcaagaacgataccaacgatgggtggcccgacatggccgaaagtacaagagcaagaacgaatgggcattgcggttcgggatatacaaatccaattctcagttcattgattgtgtcaattcacagaacctatcattcaagttgaccgataacgaattcgcagacatgacaaatgatgagttcagagctatgtatttgggttaccaaagcataagatctccatgtgagagcaacagcaaaggcttcgcatatgaaaaatatcacaatttgccaaaaagcataaattggagaaagaaaggtgctgtcgctccaatcaagaa

SEQ ID NO: 4918 - DNA, 359 bp, Gossypium hirsutum
  unsure (1)..(359): unsure at all n locations; Clone ID: LIB3493-039-P1-M1-G7
ccgactccggtattgcgtttaccctgcggagtgcgagcttctcaactaccatactaaacanttnactggtagagactatcccccaaaaatggcaagttccagtgtctccttcatcatcatcatcatcaccaccgtccttttgccatccctctcttcacagctgtccgatctctttccttccaacaacccgacggccttnctcggtaaacattcgcacccaatcaaacaacccaaccaccaccaacaataccattatgaaacccggtattttttccaaccggtggaccacttcagcttcttggacctccccaggtttncgacaacgttaccttatcaacacttaacactgggtcgggcct

SEQ ID NO: 4919 - DNA, 419 bp, Gossypium hirsutum
  unsure (1)..(419): unsure at all n locations; Clone ID: LIB3493-039-P1-M1-G8
cttaaaggaattctttatttctggaggtgatggacttcctcgaggagtcgttgaaaatcaagttgctcgtgttcggcttgttgtaaagttgcacggattggagactcgagaattggtcgaggacttgagatcttcaagtggcaaactaggtgctgataaccagactctactgagaatactatgccacagggctgattcagaggcatcccagtttgtcaagaagcagtataagatacccaagtcttctgcataggctgtagttcgactcanaatcggcttgaagtaggagaaagcgttgacttgaaatctggcttgacgtaggagaaaatggcaaatatgcatcagccggtttgtgtgaaatataagttcatcactcccttggtagaaaaaacaactggattttctttcatccctcttta

SEQ ID NO: 4920 - DNA, 69 bp, Gossypium hirsutum
  Clone ID: LIB3493-039-P1-M1-G9
ctaaatactatactcgattcttgtatggcgacggcctatttgcagagccgcttaacactgctaacttat

SEQ ID NO: 4921 - DNA, 360 bp, Gossypium hirsutum
  Clone ID: LIB3493-039-P1-M1-H1
cttctctagaggtctggtctactcaacacttggtcctgcctcttagcaaccaaagactcagatccgctcggatttctttgtcccagaactagaatggagacctttctattcacatcagagtctgtaaacgagggacacccctacaagctttgcgaccaggtctctgatgctgtgctcgatgcctgcctagcccaggaccctgacagcaaggttgcctgtgaaacatgcaccaagactaacatggtcatgggctttggagagattaccaccaaagccaacgtagactatgagaagattgttcgtgatacatgcccctccattggatttggttcttatgatgttggccttgatgctgacaat

SEQ ID NO: 4922 - DNA, 457 bp, Gossypium hirsutum
  Clone ID: LIB3493-039-P1-M1-H10
gttttagatccatctcttggaatcaaaaagagatggccaacaacaacaatctagaggaatccagccctcttttgagcaaacaagttagtgttgaagaagatgagaagaagaatctaaatgttaacaactccaccgacgtggcagcttcgccggcagctaggaccggagctgggttcgggtggaccgccaatggtctgcccttggtccacgggagtgtcgtcggagaacctatgggccggtctcagtgggattcctccctcctcgcttgtcttggccgtaacgatgagtttgcagcagtgacgttgaagtttgtctactaggaagcgtggccccttgtgtgctgtatggaagcaatgttgaaagacttggatctgcacctgggacctttgcaaatcattgcttgccttattctggtctttacctgattggaaattccttttttggctggaattgtctt

SEQ ID NO: 4923 - DNA, 236 bp, Gossypium hirsutum
  Clone ID: LIB3493-039-P1-M1-H11
tccccacctcgtggggttctggttctggttgttggaatggcttttctctttgtgcatttaaatcacactatctttgattcatgcatgatctcaaattgtatgcctctgaaaggactctactgaagcttaaaacattgcctactttataacaccaccgttacaatgtcactactgtccctcatctaaactaaggacctgtttcatggtcaaagcgaaattattgcttctaacattat

SEQ ID NO: 4924 - DNA, 429 bp, Gossypium hirsutum
  Clone ID: LIB3493-039-P1-M1-H12
atttgctcaaaggtttggcggaaatttctccttacacaacgccacaggattcacgccagattcttccttctgttgttcagcttttaaagaagtacatgcctcgaaggaagactggtgaagaaacaaactttacctatgttgaatgcttgttgttttcattccaccatttagctcacaaggctcccaatgccacaaatagtctatgtggttacaagattgtgactggtcaaccatcagataggcttggggaggacttctcagagtattataaggagttcactgagagattgagtagtattgaagacctaactagggccacaatgaagaaattgactcagggaatggctgagcacaataaagcaatggcagctgctaaatctgatgaagcaaaggagagcattaaaactcaaaagcagaataccacaactg

SEQ ID NO: 4925 - DNA, 362 bp, Gossypium hirsutum
  Clone ID: LIB3493-039-P1-M1-H3
gcaactcaagcttgttgctggcaactcagctggcactgtcactgcttattatctgtcatctcaagggccaacccatgatgagatagactttgaattcttagggaatctgagtggtgacccttacattttacacaccaatgtcttcacacaaggcataggcgacagagaacaacagttctatctttggtttgaccctacaagaaacttccacacctattccatcatttggaaaccccaacacatcattttcttggtggataacatccccattagagtcttcaaaaatgctgaatccattggtgtaccgctccccaagagccaacccatgaggatttactctagtttatggaatgctgatgatt

SEQ ID NO: 4926 - DNA, 422 bp, Gossypium hirsutum
  Clone ID: LIB3493-039-P1-M1-H4
gccagtgccaacttttttccgaatttataagagcaagggagttgatgagtttcagccatacccgtatttgtgcacagttctgaactgtattttctggatgttttatggtcttcccattgttaaaaaagacaacattctagtcttgaccatcaacagcgttggccttgtcattgagttgctctacttaaccgtatacgtggtttatgctaatgatcggaagaaaaggcttcgtgttgctcatatcctcttggctgaagcagcattgacagtagccgttgttctcattgcaatgctctgcttcgacaaacacagatctcttttcgttggaattatagctgatgtttttaacatcattatgtatgctgcacctctaggcatctggaaaaaagttatcactacaaaaagtgtggagtatatgccat

SEQ ID NO: 4927 - DNA, 431 bp, Gossypium hirsutum
  unsure (1)..(431): unsure at all n locations; Clone ID: LIB3493-039-P1-M1-H5
catgaaaacctccctttttttcttgtacttaggatctgggtcatatttcagtgtggtgctagtatttggtacaggcagaagcgagggtaaggagaacccatttacagccaaagcctcgttgattcgttactggaacaatcacatttccaacaatcttcccaagccaccatttcttatctccaaagcttccccactaaacgccatcgacttggccaagctcactcaactcgccaatcataactctctgtcttcccacattgaatctttttgttccttagccaatcttttctgctcattccaggaggactcctcgaaactagacgcagttgtcaagggtaaaggggatgcanaacttgcagtgtattccagtaaaaactttaaaggttatggctcgttaagacgcggagggatcgactccttcaagaactact

SEQ ID NO: 4928 - DNA, 399 bp, Gossypium hirsutum
  Clone ID: LIB3493-039-P1-M1-H7
ctattacacccatctcatgaagcgggtgcaggggggtcccgttcgtggcatctctttgaagctccaagaagaagagcgtgaacgtctcatggatttcgtcccctacgaatccgtcatcaaggttgatcaaatcgaagactatgatgaaactcttgttatgctttcggttctaggcatggactagattatcacccttgatagggtgctagcaggttgatcaaggaatgtcaaaccttgttgccaagtcaagcgatgaaacatgacatggtacaaccggcttcgtgtgatctgtagtgcattgcaatcaaagagcttgcaaaaccagtttcccttctttgtgagccctaactgattgtagatgttcatccaaaagcacaaacacctattggttattgatta

SEQ ID NO: 4929 - DNA, 288 bp, Gossypium hirsutum
  unsure (1)..(288): unsure at all n locations; Clone ID: LIB3493-039-P1-M1-H8
tataacctactattctcaacactataaggcggagggtttatttgtatgtcgggaatataaaaacccatcacnaacattgttgactttttattgattttcaaacctataatcaccccatttactttacctattaaggaagagcacaagatcttcttcgacagaatcatcattcctcttaacaagccaaaacctctagaaaattattctcaacaattgtctaatcgaatctctcacttcattgataatgaaccgaattcatatactacattaatacaggggttgttgaat

SEQ ID NO: 4930 - DNA, 346 bp, Gossypium hirsutum
  Clone ID: LIB3493-039-P1-M1-H9
gtggcctctccgacatttccacgtggggcgcggcacagcggcttatctacaccgacggtgtcactaattcacgagcacgcgtgttgggcggcagaagctgactgaatgcggggctttatacacgcgcttctactgaatatatcaggcaagcggagtgggatggaagattatggaaccgatcgtacaagtgggttgacaaatcagtggaattcgctccacagtgggcgcattgctcatctgctgggaagcacggtttgtataatgaaccgtcagaagaaaaagccaaggatatggaaagtgggagtttatattgctgtaagtggggtagtaattgggactatcattg

We claim:

1. A substantially purified nucleic acid molecule that encodes a cotton protein or fragment thereof comprising a nucleic acid sequence selected from the group consisting of SEQ ID NO: 1 through SEQ ID NO: 4930.

2. A substantially purified cotton protein or fragment thereof, wherein said cotton protein is encoded by a nucleic acid molecule that comprises a nucleic acid sequence selected from the group consisting of SEQ ID NO: 1 through SEQ ID NO: 4930.

3. A transformed plant having a nucleic acid molecule which comprises:
(a) an exogenous promoter region which functions in a plant cell to cause the production of a mRNA molecule;
(b) a structural nucleic acid molecule comprising a nucleic acid sequence selected from the group consisting of SEQ ID NO: 1 through SEQ ID NO: 4930 or complements thereof;
(c) a 3′ non-translated sequence that functions in said plant cell to cause termination of transcription and addition of polyadenylated ribonucleotides to a 3′ end of said mRNA molecule.

4. The transformed plant according to claim 3, wherein said structural nucleic acid molecule is a complement of any of the nucleic acid sequences of SEQ ID NO: 1 through SEQ ID NO: 4930.

5. The transformed plant according to claim 4, wherein said plant is cotton, soybean, maize or wheat.

6. The transformed plant according to claim 4, wherein said plant is maize.

7. The transformed plant according to claim 4, wherein said plant is soybean.

8. The transformed plant according to claim 4, wherein said plant is cotton.

9. The transformed plant according to claim 4, wherein said plant is wheat.
